United States Patent Application Publication US 2025/0295137 A1 - sequence listing, part 16

SEQ ID NO: 16 - DNA, 1906263 bp, Latilactobacillus curvatus
  source 1..1906263: mol_type = genomic DNA
tcttgtcgaatcaatgtttcactcacataaaacttatggtataaattttctatacttttcgtgaatggtgcattgaatagacaacttaatataattacatttcgtctctcaactggcgagaatgcgacataatctttttcgtgagtttgcttcattatttgtaaataattctggtaatttaacaaatagcctcttccatgctccgattctactaaagtcattttataagtctcatttatcgatttaaccgacctgtaaatcgttttttgagatacggcaactacatcggccaattcatttgctgtcatgtaatctccattctttaacaaagcattcaatatctgattcatataaccagtcatattttcctccttatgtttatgatagcgctatttttattaaaaaaagataaacctttgcccgttgctacggtcattcttcttgtttttctttattctagtacatcttgtgtaatgtatacaaaaagccctaccgtattccggtagggcttttcgttgtgtggagttgctattaatattattttttggtacatccttagtgtagcaaaacctgggcagcattccagttacaagttcagcgaattgatcggaaagtgaacaatatcactaaattgtttagtcacttttaacgatttgctcaagctgcttcaaattaaaacataaccgctcatcaatcacttccggttcggtctgcagattattttcaaaccaacaatctaattggcgaatgattgcaccaccgtaaaagtcttccaagtgatttaactgttgtggcgtgtattgtgctttgtaatggcgcaatgccttatgaataatctgtttcataacctgttcaaaaaagcggcggcgttccggataatccgctagatgatataaattcaagcaaaacatgcgataccgtgtaataaattgaacggcttcatgacagccagattcccagtcgccactcactatactctcatcaactttttgaataatttgttgttcaagtgtccaccgaaataagccgcacatgcccgttggaaaatgattataaaaggtcgttcgtgataaattagccgttttcaaaaaagtcgcgaccgtcaatttcgccactttttgatccattaataattcgattaaaatcattgccatatagcgcttagtcgcttgtcgtcgtgtcatttacccacccgttctaattactattgttattttaccaataaacaatcattaacggtaatattattaacaaagattaattttatagcaatgaaaacgttatctaattattatcgattgcacaaaaaaagcggtgcgaatttgatattcgcaccgctttaacacattaattatttttctaaaccttccgcaactgcttctggatagttggctgtgacaattgcagcacaacgcgcacaaagcattgggaacttatcatctgaaccgatatcagtcttaatcatccgacaacgatcacaaacgtccccctcagcatgcgcaacactaaccgcaatgccatcaaattgtgtggcttctgctgggacttctgagttttgatccgcaattgttaattgtgagacaatcaataattgtttaacatcagcatccaatgaagctaataaagcagcattggcttcgtttggataaagtgttacggccgcttctaatgacttaccgatgaccttgtccatccgggctgtttcaagagcttttaagacatcgtcacggatccccatgaaggcattccaagtttcaactaagtcttcttcaccggcaaaatgttcaacttctggcatttcagctaattgaacgaattcttctggttcgtgtaagtagctccagatttcttcagctgtgtgtggcaagattggtgtcaataacttcgtcaaggctactgctactgcatagaaaacagtttgtatgttacgacgaggtgcatcattttgaccatcgatataaacaacgtctttggcgaagtctaagtagaaggctgataattcgttcgtcaagaacatgttaattgtcttataaactgtggcaaagtcgtaagcatcatacgccgctttacagctggcgatgattgcgtttaagcgcaccaacatgaacttatcaactgaacctaattctgcgtaatcaactgtatctttagcaggatcgaaatcagttgtgttcgcaatcatgaaccgcattgtgttccggatcttccggtaagcttcactgacttgttggaagttttccattgtgactttcacgtctgagctagcatcaactgaagcgacccagaggcgcacaatatccgcccccatttgtttgatgatcttttcaggcaagattgtgttcccaagtgatttactcatcttacgaccgttaccatctaagacaaagccttgtgaaataacagctttataagggctgacttcgccaactgcaacactggtaattaaacttgagttaaaccagccacgatattgatctgaaccttctaagattaagtccgctggataagttaagtcatcgcgagccgctaacacagcttgatgtgatgaacctgaatcaaaccagacatccatgatatctttttcttttgtaaattcaccatttggactcccaggatgtgtaaagcctgctggtaataagtctttagcatcccattcaaaccaaacgtttgaaccatgctctgcaaagagttgcgccacacgttcgattgtttctggcatgacgatttctgtgccgtcttcagcatagaagattggtaatggcacaccccatgcccgttgacgagagataacccaatcgccacgatcacgaatcatgttgtaaagacgggtctttccccattctggcatgaattcaactttttcgatttgtgctaagatttgatcgcggaacgcatcgattgaagcaaaccattgggctgttgcccggaagataacgggtttctttgtccgccagtcatgtgggtaactatgcgtgaagaagtcgagtttcaataatgaaccgttcttttcaagcgcttctgtcaccattgggttggctttatcgtaataaacgccttcaaaaccaggggcatcttcagtcataatccctttgctgtcaacgactgaaaggactggtaacttatatttagtgccagcgttataatcatcttcaccgtgacctggtgccgtatgcactaaaccagtcccagtttctaatgtcacgtggttgcctaagatcaccaatgattcacggtcatataatgggtggcgggctgtcattaattccatgtcagcacccttgaaagtcttcaagatttcaactgattcccaaccaagaagatcagtcatcttgttcaaacgttctgctgccacaacgtatttttggccgtcagctaacacttgaacgtaatcgaaagctgggttaaccgcaatccctaagttagcaggaattgtccatggggttgttgtccagatgatgaattttgtatccgcatctaataagtctttcccatccaccacgttaaacgccacgtacattgatggtgacttgatgtctttgtattcaatttcagcttccgctaaagttgattctgatgaaggtgaccagtaaacgggcttcttacctttatagatataaccttttttagccatttcaccgaagacccgaatttcttcagcttcaaaatcagctgttaaagtgatgtatgggttatcccaatcagcagaaatcccaagacgcttgaaatcttcgcgttgcttgttgacttgttccatggcatagtcgtaacaaagtttacgataatcaacgaggctcatttctttccgcttgataccctttttagccaaggcttgttcgattggcaaaccatgtgtatcccatccaggaacaaaaggtgcgcggaacccgttcattgatttgtaacgaacgataatatctttacttgttttatttaaggcgtgacccatgtggatgttgccgttcgcaaatggcgggccatcatgaagaacgaatgaaggtttaccttcatttaatttttgccgttgttgatagaggttgttatcggcccaacctttttgccaatcgatttcacgattcggtaaacctgctcgcattgggaaagctgtcttgcccaggtttaatgtttctttgatacgcatcaaatcactcctttatttttaaaaacaaaaaaagatcccgccctgaataggacgaaatcttcgtggtaccacctaaatttgaaggtcaatgaccttcctcaacatgcaataacgcgcattaagcgtcccaaattactcaattcatctgggatgaaataaggtgatacaccgctaaacagagcattaccaaccttccaccgtcgttggctcgcttaaatgatgttttgcttgctagtccttatttaaatctgttgcttggttttcaattgggttgtaagaatccgtaacagcttcaaccacttcatctgaatcggtgtcttcgactacatcggagagcacttcatcattgtcatcttcttcgactggtgtttcttcaccagggaaaataatggtttgcgttgttgtcacatcatcttcagcaatttgaccccaaggtttaacttctgcatccgagtttacttgatttgacccatggttgtcaaggtctgtcatatcaatttcagctgaaagagcttgatggtccgctaaatcatctttagctaataaatctgtccattcaggactcttaaccacttctaattgtgattcaagcataacttgtaatctttgacggaaaatccgtgtttgtttcttcaagtcatcggtttcgattgcaatttgttttgcacgttcagttgcatcgtcaatgatgtggtttgatttttcagttgcatcatccaacattgattttgcattcttttctgattcagtttgaatcatttcagcttcttttttagcgttatctttaacacggtcagccgcttcttgtgcaacaatgattgattggttcaacgcatctttcaattcattaaaatacgttactttttcatcgcttgattttaattccgcttttaaactttcattttctgttaaaactgattcgtagtctttaatcacttgatctaagaaatcattgacttgatccggattgtaaccccgcatttttgtgttaaattctttgttatgaatatctaaaggtgttaaaaccattttgaaattcctccatctttttcagcaattattttcttaaaatccccagtgtcactcgatatttttctttacgagtctgaccatcaatcgattggagttgaatccggccaaaaccacgaacagagacgatatctaatagtgctaattcaaaatctggtttatcaaatgcttgccaattcagtttaactttgttggcttgaattaattctttagcgcgttgtcgcgacagattgtaaacagttgaaatgatcgtatccaagcgaaacgagctgacagtcgtttgttcgaattgccaagcgtccttaggcgtcaacaactgtgtatagtcttgttcttgcaaatgaactgatacgcgaccaatcttagtgatttgctcttcgacatagcctgccatcttcttcgtcacaaagaattgccagcgttcttcatcggtcataatatccccaaaaacatcacggtcaatgccagcattcacaagcgtgccaagcaccttcccatgtgataggtttgcaaatttaatcgggtaccgaatctcaaataattgaatctcaaaatccgcatccgttggttcaaagtaatctggagcaatcattgcccgtttccgttcagcagcgttatatccgccattaaagtgataacggacgtcccctttttcaccgaccaaggtttgtaaaataaacgcttgacgcggatctaaaaacgccgttaagattggtcgatattcaacttgtgcttgctcaatccaatccaaaacctgcgcaacaaatggcgcctcgctttttctaaaatgttgatagacatctgcttgattgaccattgattacatccccactaataattgtgcgagtaagccgatcccacgttctactaaatataaaacgaaaaacgcagcaatggctgaaatcccaataccaccgattgcaggaatgaagcggtcaaagatttctaagaaaggttcaactaacttagcaacaaagcgccctaatttactgcccatcgcctctggaatccacgttaataaacaatagattacgacgatgccactataaatccgtaccacatacatgagcatcaagagcacataaaataaaaatagttgcacctagttcacctcaatatcaaaatcattttgatcgacaatatctgaaagattaccatcgatttcatagttcggtggcgtacataagaaaatctgatcaccaacccgttgaatttcaccgttgatggcaaaaactgcccctgttaggaaatcaacaattcgagtggcttgtgtcgcttcaattcgtgtgaagttaacaatcactgctttattttcaagtaaacttttgccgactttttttgcgtcggaataaatccgtggttcacataagacaattttattcattttagtagctcccgcagcttgcatcgagacgacgttattcgggcgaacacttggttcaccttcattagtgacagccgcagtttcttgcgtattagcatattcatcttcatctgacatgccgaaaaaattgctaagactaaacttaccagccatgagtcatcctccttagttattgcgacggcgcttgaaaaatggcggcacatcgtccccattttggttatcttgcttattatcatccgcttgggctgtccgtttgaagatatcgaaatctttcttttcaatttcatcaaatttttcagttgcttgcgcttgctcgcgggcacttggttcgcgacgcatatcccaatctacaaatggatcattattttgttctgatggtgttgaaggcgctgttgtctttggtgctgaattgtttgttgctggacgacgtttgttgttatcttcatcaatcccagttgcaataaccgttacaacaacttcatcaccaagattttcgttgattgaagtcccgaaaatcaagttaacatcgttagttgcagcttgttgcacgataccagcagcatcttgcgcttcaaacaatgacaagtctggtccacccgtgatgtttaagaggacttgttctgcaccatcgattgaaacttccaataatggtgatgaaatagccttcttcgttgcttcagctgtccggttttcacccgttgctgaaccaatccccatcaaggcagagccttggttagccataactgttttaacatcagcaaaatccaagttgacaaaccctggtgatgtaattaagtcagaaatcccttgaaccccttgacgtaaaacattatcggcttctttgaaggcttccatcattggtgtcttcttgtcaacaatttcgagtaaccggttattagcaatgatgaccattgtatcaacatgttgctttaattcagcaatccctgaagcggcgtttttaccacgtttagggccttcaaatgtaaatggacgagtaacaacccccaccgttagtgcgccaagatctttagcaattttggcaacaacaggggcagcgccagttccggtaccgccacccatgccggctgtgacaaagatcatgtcagcgccttttaaggcttcgttgaggacttcttcactctcttcagcagctttttggccgatttcagcagttgcgccggcaccgaggccgcgagtcaacttaggtcctaattggatctttgtttcagcttttgaatcttcaagtgcttgaacgtcagtgttagccgcaataaaatgaacgcctttaacgccttcgttgatcattctgttgacagcgttaccaccagcaccaccgacgccgattactttgatgattgcgccgctattttcttgtgctgcatctaatgaatattccatctgtttttcctcctgttacgactagcccttattcaaaaaagttactaaagaaatttttcaggccttcgaatgcattttttgattgatttttaggtttggttttcttacttggtacttctttggttgttgcttgagatttcattgttgatttcgtcactgtttggtctaattcagtctgtgctacattcccaagtgcgccttggaccaaccaatcaacttccgacaagttagctatgtagttaattaaactcaacccttgggcaaatgatgggtgccgcaagcccatttgatctggaatgtataacttcactgggcaattaaagatttccttagccaagtcgacaatcccaggtaaagctgtcacgccaccggtcataatcaccccaccaggcatatcaaaagcgtgtactttatccaattcagctttcaaacgatcaaaaatctgcatcgtccgtgcttcaataatctcagctaattttttctctgtcacttgcactggtaaagcttgaccaacaacttcaattggaatttgttcttcttctgaagcagccaatgaatcagcattgccataatctcgtttagctttttcagcattttcaattgacgtgttcaagaccacggaaatatccttggtcatatggtcgccaccttcttgatcaatcgccgtaaattttaattgatgatcatgaatcacagcagctgtactttgaccaccgccaaggtcgacaacgattgccccaaaatcttgttccccgtctgataaggctagcttaccaagtgctaatgggttcactacgagttgtgatagtgttaaacccgctttttcaatacatttctttaaattatgaatcattgtcttgggtgcggtgaacaaaattccgttcatctcaagccgaacccccatcattccgcgtggatctttaatcccatcaaatccatcaaccgtaaacgattgcggtaagatattgaggatttcacgttcaggtggtaaattccgaaccaatgcggcactagcaacgtcttgcacatcttgaccagtaatttccttagattgatcagagaccgcaatcatcccttggcattcttcgatttgtagttggttggctggaattccagcaacaacccgattaatttcaatatttgctttttgttctgcttgttgtacggcttgttggatagcggtaaccgcttgatcaatgtccacaatcgtcccgcgacttaatccgtttgatctagctgatccgacgccaatcacattaagttgtttattaattgattctgcaacaattaccttaattgaagtagttccgacatcaagaccgacatatatttttgaattctccattaagtgtgtggaacctccttgcattcaattagaataaaatgattcctatgctaaatagtaccacatttcgactagatttagaaagccaatccaatctttttaaacagtgttaactaattttttgttgaatcagcctcagaattatcaaataatttggcgtaagcgccaacttctaagtcaattcgtcccttaccgtccatttgtttcgccagtgtgggataatatttaattttcttggcaagtgtccgcaaatccccaacaacctcattaccatcattcatatataagtgaacttgataaggattattgttcttagctgttaaacgaatttccgacacagcactttgaatgctgtttggaaaagcttgatatagttttaacccttgctttaagaaggcgtcatttttaaattgactatagacagggctattgccgagagactgcgtcattttcgtctttaaaatcgtgccattttctaagattggataatattgtttatgccgcactagatagcccaccgtaggatattccttaatcgccaatgtcagttgattaaactgatcaactttgacatttacgcttttcaccttaggtagtttctggtgaatccgcttctcaatcgctttttcctgccagatttgtgtcaggacgttatcgccaatccgtacgccactcgcattaatcacctgttgatcgggcactgatttagtcccgttgaccgtcatttgttgaacgtcgctaatcggcaacataaaatagattgccacacaagcgcccaatgtgaaggtgctcaataacgctgtcaaccgccactttgtctttgccgttcgttgcgcttttagatgtggtagttgaccactaattgttggtcgcccaggcgttaatcgttgccgacgttgtttcttccaacgctttagttgataagcgcgccaaacgtttagtaattggagcggatcgagcgacccatttttagttgtttttttcttcaagtcatccgcccccttcttaacttagatgatagtattaatcacttcaataatgcgatctgaagcgtctggaatccccattttcttagctgctttagccatggcttgttgactatcaggggttgccaaaagcgtatctaatgactgaactaatttgtcacccgttaattgtgcttctggaattaaaatcgctgcgtcttctttaaccaaactctcggcattttttgtttgatgatcatttgttacataggggcttggaatcaaaattgacggaatcccaagtgctgtgatttccgccaaactcgtcgcaccagcacgaccaacaatggcctttaaatctggtaaaatttcaggcatgtcgttgatatatggtacaacagccaaattatcgttgagcgtcatcgtctttaattgtgcttgaacatcatcaaaatgaacccgtccagaaacgaatagcacctgatactctcttgtattaagtgctggtactgcatcgataaaagcttggttaatacttggtgcaccacggctcccaccaaacacaagcactgtcggactgtcagtcttaagcccgaattcacttaaacgttcgtttggcaacattccagcaacttgttgggcccgcggattgcctgttaatacaattttgtgcattggaaattggtcgctgactgattcaaaggaaatggcaactttatcgacaaagcgcgccaaaaagcggttggtaaccccggctgctgagttttgttcatgaatcaacgttggcacttttaagcgacttgctgcatatagcaatgccccagaaacatagccacccgttccaatcacaatatcaggtttgaatgttttaatcatttcttttgcctctttaacactgcgcaagaaaagttgaattgttttaatattcgttttaatgcccttcatattcatcgaacgtttaaatccttggatttctaacgtcttaaaatcgatgccttgatctggcacaattttactttccaaaccgcgtttagtcccaacatataaaacggcatccaacaagtcgcgttgttgcattctttcaattagggctaacgctggatagatgtggccaccagttccgccaccagatatcattactctcattttagaatctccaatttaatctgtaatttgttcgactgccttaataaagacgtctccacgttcttcaaacgtcttgaactgatcccagctcgcacatgcaggcgacaataaaaccacgtcgccggcttcactagcagcataagcttcaggcactgcttttgttaaattatcaactattttgatgacgggaatacctgcttcacgtgctgtctgtgccaacaattgtttggtttcaccatataagatgattgcttttacgtgttcttttagtagtggtaataatggttcgaaagtaaagccccggtcaagaccacccgctaataaaacaattggttgtttaaaactcttcaacgcgacttcggtagcttccatattggttgctttagagtcgttatagaagcggcgaccttcatagctcgtcacaaactgcatccggtgtttaacaccggtaaaggtcgttaaaacatcaatgatcgcatcgtttgattggtccatcaacttagccgccgcaattgcggccaaagcattttcaatattatggttaccagggacgttaatatcagtcactggcattatcacttcacccttaaaacaaagttggccatctttgacataggcgccagcttcagagttgcctagccgtgaaaatggcacaacttgcgccttagtttggcgactcaattcacgtagttcaggtaagtcccagttgacaacaaaaaagtcgtcagccgtttggttttgaataagtcgcattttcgcagccacgtaattcgcacgcgagccatgatagtccaaatgtgcttcataaatattcgttaaaactgcaatcttaggtttaacggttgttgtaccgagtagttggaaacttgataattctgtgaccatcacatcggcagccgtcactttttgggcgaccgcacttagtggaatgccgatattgcccgcagcgtatgcgtgcccctgggtgcgattttcatctaacatcaacgtaattaacgttgtggtagtcgtcttcccgtttgaaccagtcacactgacccattgggcttcagacacttcgtacgcaagttctggttccgttaaaactggaatcttacgcgcaatcgcttctgccaccattgggttatcgtaacgaatgcccggatttttgaagaggtatgcaaagttgcgctcaaataacgccaatggatgcgatccagtaatgacggttgcccctaattcacgcaattgtgcaacttgaggattgtcttcttgttcctttccgtcattgacggtcacaatcgcccctaattttaataacaatttagcagcattaaagccgctcttccctaatcccaaaactaaaactgcctgatcttgatacgtcgtgctggccttcattaaattcgccctcttctaaaaaattaacagataaattgctgaacagatgatactaaataaccaaaagctgatatcaatccgccattcactccaccctgacatttcaaagtgatgatgaatgggactcattttaaaaatccgcttatggaataacttaaatgaaccgacttgtaacatcacacttgctgtttcaatgacgtatactaacccgaccaatagcagtgagaactctcgatgtaataaaattgacatggctgctagtgcgccaccaagtgctagtgaaccaacatcacccatgaaaatttgcgctggttttttattgtagattaaaaagccaagcaatccgccaataatgctgaggccgaaaatggcgacatcaatttggttttgacgaaaggcgataattgtataagttgcaaatgagatggttgccaaaccagcaactaacccatcaatgccatccgttaagttcactgcgtttgagaaaccgactaaccacactaagacgaatacacaaaagaaccagttacttgaaatagtgccaattactgggatttcaagtgcagtactgaagccttcatggaaataaacagcgatgaagacaatcccaccaataatttgccctaacaatttttgccaagcgcgtaagcctaagttctgtttacggaaaactttaataaaatcatctgaaaaaccgagaataccgtataacaccagaataaacatggcaattaatagactattcgttaactgttttaagaataaccccacccaaatacttgaaacaacagcggcaataatgaataagagcccgcccattgttggtgtcccatttttcttagcgtgccatttggggccttcttcacggattgtctgcccctcttttttaaagcgtaaatacccgataaaaagcggcataaaaatcaccgtaattacaaacccactcattaagggcactaaaaattgtcctgctgccatttcataaactcctttaatccaactatcttattttaattgtacttttatttttttaaccccatctagcaacccattgaccgctaggctttgatgataagcatatccgctacctttgatgtcaatctcaacacctgttaattgcgcgagcttcaagaggtcatttttcgaccaacccgtgacatctggcatcgtcattgccccattggtcattaaaatgactcgctgtttaggtaaaatcacactattggcctttggtaattgctggacgactaagttcccactaccgacagaagcggtttgtaggcctaaatccgttaatttcttttgtgcttcatccgttgattgaccaatcacagatggaactgttacttgttgttgtgtgtctttttcagcctttttggtatactccagtgcccgtttcatcattggattaaagacctgtgccaaaatactttcagcactatctgtcatattctgcggctgtttcattgtgacatataaaatatacttaggatcatcagctggtgcaatccctgatacagagaagatataattgcttgcgccagttaaatagccaccgtctggatcagtaatttgtgcggtcccggttttaacggctactttataatctggaatttggtaaacctgacccgtcccataatcttgataaacaacatcttccatattttgtaagacagatttggccgtgctagccttaattggcttaccagctttgattggttttacttgatgatcctgattaatcccagataaaatctgcggtttaatcattgtgccatcgttcgcaatcgcacttgtcatctgcagcatctgcattacattaacgttaatcccttgaccaaacgaagttgtggcctgatctaggggccgaacatattgcaatgtcccatctgtttcaccgggtaattgaataccagttggttttaagaagccaaacttctgaatgtagtctttccaaaccttaggacccatggcttgttcaagcttgaccatcccaacgttacttgatcgtgcaaaggcttgactcagcggaatcatcccccagccactcgtttgccaatcactaatcttcttgtcaccgacttcaattgaacccgattgataatactgattaggattgtaattaccagagtcgatggcagctgccaaggttgcaattttcaaaacagagcctggttcatagccatcttcaactaatgtatctcgccaaatcttgccaattccctttttagtgctggcattaaaggttggtcgttgtgaagccgccaaaatttcacccgttttagcattcatcaaaacagcattcatactcttaggcttatattttttattgacgctcgttaataaagtttccatgtatgattgtaaccgagaatctaaggtcaagtaaatatcttggccgtttttagcggcttttactttgtttttcttttgattgatcgtgtatccataggaatcacgggcaaaattcttgtaaccatcttggcctgctaattgtttgttgaagtatttttcaatccccattacaccaacgaggctttgatcagcgccgtcttcgtcctttggtgattgagcgataccaatgacgtgagatgcgaatgttccattagggtacagccgcgtaggggactcattgaagtaaataccggttaaatgttctttttcaatcttccgtttgatgctcagtgaaaggttttgtccggcacttccgaattcaacttgataaactgaacggttagctggcgttaattgtttatagattttttcttcactcaatggtagatagcgactcaaaactttcgctgtttttttcttatcagttacatataacggcttcttattagggccaacgtaatcgtgacttaataccgcatacactgaataggcgttaatgtcttgtgccaaaacgttccctaaagaatcataaattgtaccgcgttgtgcgcgaatcacggaatcagctttgtattttttctgtgatcgtttcgttaaatccacccctgcaatatgcccagtagcaacaatgtaagcaaaacgaccggcgaaaactagaaaaatcgccgcgataattagcaataaaagcctgccaaaaacgcgtcgattccgccgtggactcttacgtgtcttaactgatttcatttagacacgttccgaatattattttcatttagtttaagatcatgtttctgggcaaaagcattcagacggtcagagcttgttaattcaccgatctcctgttttaaatcattattgttagcgctgacttgggccatcttttgagtcgtactttctaatcctcgttgtgcattaacaactgcaattttggtggttaacaaactaaccaacatcgcgaaaaagataattccaataactgacgtcgctaatttttcaacagctgaaaaagccacttttttagactggcttgcaactgcttgtttatgtacagtaggctgcgtttttagcggtgctactggcgtttctaattggcgtgccgtgttagttgccatcatcatcaatccttctagtcaatttctttttgtttttctgcgacacgtagcttagcgctatgtgcacgatggttttcttctaattcatcatctgttggtagaatcggcttgcggttcactaattttagaaccgttttttgttcttctggtaaaattggtaaccctttcggtaaatctgggagcgttgcttgttccttaaacatcgtcttcaccaaacgatcttctaacgattggaacgtaatgacactgatccgcccgccgacattgaccaatggaatagcttgttcgagtgaatcttcaattgcccctaattcatcattgaccgcaatccgaatcgcttggaaaatccgctttgctggatgtccaccctttcgtcttgccggtgcaggaattgcttctttaatcaaatcagctaattcgattgtcgtttcaatcggcgcaactgctctttgttgttcaatcttccgcgcaacttgttttgagaacttttcttcgccgtagcggaaaaagatcttaattagttgttgataggtccactcattaacgacattgtaggcactgagttcagccccttggtccattcgcatatcaagtggggcttctttcttataactaaacccgcgttgggcatcatcaaattgtggtgatgatacgcctaaatcgtataaaataccatcaatcttagtcacaccgtgttctgctaacgctgcttttaaatagcggaagttactcttaataaaagtcacttggcccgcttcagcatatttggctaatcgttgtttactacttgctaaggcatgatcgtcttggtcaaacgaataaagatgaccggtcgtcagctgagataacaaatattcactatggccgccgccccctaatgttgcgtctacataaacgccatcgggttgcacattcaaggcatcaaccgtttctttcaataaaacactttgatgtttaaatgtttctgtcatctatttaccatccttctaaaaatcaaaatctaacatattttctgcaatatcatcaaaattctcttcagcttcttcgctaaagctcgcccatttttcctggctccaaatttcaatgcggtttgagaccccgattaacacacattctttttcaagaccagcatgtttagcaagtgtgtctgggatattcacccggccttgcttatcaggggaacattcgaccgccgctgagtagaaaaagcggacgaacgcgcgggcatcttttttagcgagaggcagtttttttaacttctcttccaactgttcccattcactaagggggtaaccaaaaatacaattgtccatgccacgggtgagtacaaattccgcacctaatgatttacgaaatttagccggcatgattaaccgacctttcgtatcaatcgtgtgatgaaattcgcccatgaacataaccattcacccctttgcccaccttaactgattttagtctaccacaatcccccactttctaccacattttgccaaaaaaaaccaaaatcttatcattttggaaccaattgtgcacgatatttatatcactagcctttttggccaaaaaaaacagccatttcgttaaccgaaatggccgttttacttgttaattaagtaagcttattttgggctgtcgcaccacgtctaagcaacgccgcaaaaaattgctcactttaatctaatttttagaagtttaaaatgccagttgcagcgagtgaaccaaaaatgactgagcccactgtggcgattaacattacccaaacgaaaattttagtaatgcgactaaacgtgcttgtttgtttcttcaattattccaccacctagacttttttcttatcagcagtttacaccgaatcacttgaaagtgcaactcagtcctttttatcttttccaaaagacggtacaatgggactattaactttcgaggtgatttaaatgccatttagcacaacacttttctttgcaggcttaccgcccgtctgtgtcgcactcggctactgtatcgaccggttgactcagcgtctatttaaacatcgttttcattatattaattggctaccaattccattgctagtaagtgctatctttctgagtatgcctattttcagtaaagctggctggttcttttgcttagcaatctgtctgtggggaatcatctggagcttaacgcgcttttactacgaccgtgcgctatacctacgtaagtttctacggagttggtggcgctttgtcctcgtgatggccacagcatggtacctatcctttctaatcatcacactcctttaaaccaaaaaacggtgtcgactctttcaatttgtcgacaccgctttttttagtttaaaaaatatttccctaacgcgcttaattgcgtaattgtgattgtcggttgcaccatgattggtaatcgatcaacatcaaaataggccgtcgccacatgggcgttaatccctgcttcaatatctaatgcacgatcaccaatcatcacggttttagttttatccagctgataacgatcacataaatcgttcaaactatctggcgccggtttcctggcaaatccgctctgactcgtaacaatttcagtaaaataatccgctagtccatgcgctgccaaaaatttttctgcagcatcatcacgatgggtcaataagaaattctgaccatgtgcactaatctgtttcaaaatcgccgctgcccccggataaggttgtggcgtctgttgtaattggtgttctaattcatgatattctcgatccaattgttcaaatgaaacattagtttgctgagcaagcatctgcagttcccgtttaattgaagtctgcttaatcgcttggtataagtgcgattgatcgactgcgacttgatgatcacggtaaacctgactgagcgccgtcatcataacaggataagtatcatacaatgtaccatcgaaatcccaaatcgcattttgataactcattaattatccattctcctttgtatcaaataggatagtgactggcccgtcattgaccaaagccacctgcatatcggctccaaattctccagttgcgacgcgaatcccagtcgctgctaatttttgattaaactgttcgtataagcgtttagcatagtccggtttcccagccgcagtaaagcttgggcgattgcccttcttagtgctagcaaaaagggtgaattgtgacaccgataaaatggcaccgtcaacctgggccaacgccaaattcatcttgccatctgggtcttcaaaaacgcgcaattgactaattttcttaaccaagtaatctaaatcagcttcagtatcatcatcacaaataccgaccaataacaaaaagccttggttaatcttaccaacaatcgtctgatcaatcgtgacacttgcttggctcactcgctgtaatactactcgcatattaagtcgctcctatccttgaacccgtttgacttcgtaaacatctgggatgttcttcacggcttccataatcgtttctaaatgatctgtattgcgaatgccgactgtcacatgaatatccgccatcttatcgtgatcaatccgccccatcacgttatttagctgtttcgtatgtgcatttaaggactgtaagacatcgttcaatagtccaccacggttatagccgtagatttccaaattcgcatcatagagttgatcattcttagcgttggtattttcccaactgacttcagtcaatcgactgttcatatctgcccgatcaacgatattcggacaatcgcgccgatgaacagaaaccccacgtccctttgttacatagccaacgatatcatcaccagggactggattacagcatttactcaagtgcactaagacattgtcgacaccttcaataacaacaccgtcttcatgtttgattgtgatatggctaccatttgctttaggccctggttgttgtgaatccttcgctgatagaatctcagcttctaatgctttttgttcactttcttcttttgcccgtcgttctttaatcgttaagcgattgacgactgactgtggtgagatttcaccgaacccaattgctgcaaacagttcttcttcggcattaaaattaaaatgcggtaggatgacagctatctcggctttagtgaggtgttcttttggtgtataaccatcttctaccaacagatgttcaacagccgtccgtcctttttcgacgttttcatcccgatcttcttttttaaagtagcgcttaaccttattccgagcacgcgcggtgaaagcgagcttaatccaatcacgacttggtgtcgcacttgttgacgtcaacatctcgacaatatcaccattacgtaattgatagttcaacggtacaattttgccgttaatcttagctccaacagcgtggttcccgacttcagtatgcactaaataagcaaaatccagtggcactgaaccctttggtagttcataaacatcgcctttgggtgtgaaaacataaacgcgatcgctaaagatatcgcctttgacgctttccataaattctgcagcatcatcggaagcatcttgaatttcaagaatttcacggaataaatcgagtttacgccctgattcatccagcttaatctgttccttaacgccttctttatacgcccaatgtgcagcgaccccatattcagcaacatcgtgcatttcttgcgtccgaatttgcacttcaagcggtttgcctttgggaccaatcacagttgtatggatcgattgatacatgttggcctttggcattgcaatgtagtctttaaaccgaccgggcatcggtttccacttagtatggattgctcctaaaacagcatagcagtccttgattgagtcaacaacaacccgaattgcgagtaaatcatacaattcttcaaattgtttatgctggtcgcgcatcttgcgataaatcgagtaaagatgctttggtcgtccataaatgtcgtaattcatatctaaatcagcaattgagtctttaatgtcttcaattgcttcttgaatataagattcgcgttgtgtccgcttagaattcatcaggtgcacaatccgatagtactgttgtgggttcaaataacggagcgagatatcttccaattcccacttaatcttactaatccctaaccggtcagccaatggtgcatagatttctaatgtttcgttagcaattcggcgttgtttttcgggtttcaaatgtttcaacgtccgcatattatgcaagcgatcagcgagtttgaccataatcacccgcaagtctttagccattgctaataacatcttccggtgattttcagccagttgttcttggtgtgatttatatttaatttttcctaatttcgtgacaccatcaacgattaccgcaacatctttgccaaacatctcttcaacatcacctaacgtgatattcgtatcttcgacaacatcgtgtaagtaaccagaagcaaccgtagcgggatccatcttcaattcagcaagaatccctgcaacttgaattggatgaataatatacggttcacctgattggcgaacttgttctttatgcacataagctgcaaaatcatacgctttttggacaaaagcaagatgctcagtattcatgtatttctgacataactgtagcacttcctgctgtgaaattactttttcttctggcatcctgcctcactccaattcctcttactcgattaaaaatgtactgaatacaacaaaactgactcaactaattaactgtcgagtcagtttgcttaacggcgttcatacgcagtattaattcctaagtaacttaataaacaataaataggaacgaaccaatagttataatctgcgtagcgcacaaccaccatcaatccaaataaaatcggcaggtacaaaatgtgataccaagctgcatgggtcttttgaacacgatacccaatcataaaggctgcgcaaccattgacagccatgaatagcagtccaatccgccacgttttatcgatgtgcaagacaccaaacactagcggtaaaacgaccgccaagagaatggccactaataaatagcgtacccaatccatttttaaataacgattattcataaatttagtcatgttgtgcccctctgtaaaaagattacatctatcatactataaagtagccaattctgtcacatacgaaatcgcacttaacagatataacggcgcggtctcggcccgtaaaatccgtggtcctaaaccagccatcttaaagccagccgccgcaagcatctcaatttccttgggcgcaacgccgccttctggaccaaaaacacaaagtaatcgatccccaggttgggctgtttgtaagctctgaactaattgggcatgctcaccgtctttagctgactcttcgtaagccactaatttaatcgtcgctgattcttgtgcgaccgccgttaaactgttgcgccattcaatagttggtacatgcgtccggtgagcttgttcggctgcttcttgcgcaattttttgaagccgcgcaactttcttagcttgttttttatcatcccagcgtgcgactgagaattggctattacagaaaataaaccggtgtgcacccaactgcgtgcctttttgaacaatccagtctgttttgtcaccctttgacaagccgcatacaatcgtcgtctcaatcggtaattcaactgattttgtaattggcgattgcaccgtaacggtgactgttttgtcagttgcatccagttcagttaattcaccgatgaatgcttgttcatccggcgttaccaattcaacacgatgaccaggctgcatccgcatcacttttagcatatgatgtgcagtttcacccgttaaggtcacttgttgttctacttgaattgcttcatcaataaaataacgttgcatgccatactcctcttaatcgtcgtccgtcttttggcgtgtaatcaatgccacccagtcacccatatgaagggcttcttgaacaacaaaatcattcgccgctaacgtttcacggacaagtgcttctttatctgcaataatgccggccagtaataggtgtccattgtcattcaataaagccttggcttggggaatcaagggcacgataatctctgctaaaatattggccacaatcacatccgctttcgttgtaatcccgttcaacaaatcgttgggatgggcatcaatgccagcggtcactgggttgagggcaaaattttccttagcggcatcaaccgcaacttgatccacatcataggcgcgaatatcattgactcctaaatgcgcagccgcaatactcaaaaccccagaaccagtcccgacgtcaattaaagattcaccgccgcgtaaaaccatttctaacatttgtacggatagatgggttgttggatgcgttcctgttccaaaagccatccccggatccatccgaatcagtgcttcgcgttcatcagtcggttgatagtcagtccaacttggcacaaccgttaaaaagcgagttagccgcgttggttgataatatttcttccaagctgtcgcccaatcatcatcggcgacttgtgccaatgtcaccttaccagaaccaatcgctaacccaaagtcagtcaattgggcaacgcgttgttcaatcaacggtaatttttccggcacaaaaactgtttctgggaaaaaggcactcactgcagcacccgtttcaaggtggggaatactgtctagatcaataatttgatctggctttgcctttaaatgttcataatcggctgcgtcttcgatttggattccttccgcaccattttccgttaaaatattggcgattgcttccactgcttcgttaacagtagcgaccgttacttttgtccattccatgtagcatgtctccttcttaatgcgggttgcttagtatttagggtaagcgtagtattttttcgctaattgatcatctgcttgagcgacagttgcttggaaaacagtgtcatcccagtttaagataaaggtttcttcgtctgattcatcattcacaaaagcggctaattgatcttcgccttcatctaataagtcttgtaaatagttgaaaaagccccgaccgacttgtgcgtttaaccccttgcgaccagcaaatggaatcactgctaaataattgtctgcatattcaaagccgtccatcttactttcatcgaagaataaaatcgcatcttcataactgatttcatccgattcgttcaattcaccattttgatcttcaacggcaattgcttgttccttagtcacgtttaatgtgaattccaattcaatcgcccgagcttgtttgtcccagttgatattcatatccccactaaattgtaaatcatctaattctgcatcgaaaaatgctaacatatccatttcagccactgtattcaccatatccttttaattagtcgttatttaagtcaattttaaagttgaacgtattaacatcatacctgattatgacttgaatctaaagcaatcattcaaaaaagcccagaacaaaatgtcccagactttcaatcgtaattctacttaatgtgctgcttggttctgaccccaataaataacgtccatactctgatcgtcataacgttggaactcaattccgagtgctgcatcagattctgccatcacacgaccatatagccgcatatcagcttctggcgtgttgccatctgggcgaatggcatgcatcaacataaacttagccatttctgattgtagatgggcttcaatcggggccaacggatcaaaaaccatcgtgacaaaccgaatatcactactatcgccatcaccaattaattcaacaatcggaaacccaccaaaattttgttgttgttttaaataagccaataactggtcaatctgttcttttgtgaaggctgatttataaaagaggaaatgccaagtttgtcgtttcatcgtgtcacccacccgttatttattacatatagtatgccatactgtcaccaacaacgcgaacttagtctttttttggtaattgattcgattttggttggtgatatgcctttttcaagccagcaaatgtcgcttgaatcttttggtaatgcatttcatcgttacgcgcatgcttcaccaactgggtaaaatcgtgggactgtaagtccttttctgtttgttttttaaaccacaacatatcatcactccttatgtaattttattatacaacgaaacgttatcattgcagtcttaaatttacttttaaaccaaattgccgtaaactaacactattcattaaaggagtctattatgggaaagaagaaaaagcaaaacgcattatccaaaacattagttgaaaaaattctagataaacaaaaagtggcctacacccaacttgaattcccaacagaggaagtccacaacgttgcccaaatgaaggtcgatcatctcgatatcgatgaacatcttatttataaaacattggtgctctctggtaagagtaccggcccaatcgtcggtgtcgtcccgattgattgtcatttagacgaaaaaaaattaagccaaatttctggcaacaaaaaaattgcgatggtcccattaagggagctcgtggccactactggctacgaacatggcgctaacacgcccgttggaatctgggaacaatcccactatccgatttacattgaccaacaggctgaaaaggaaccattcatctatgtctcatccggtaaaattggccgctcaattcagattaatccgcaagacttacagcgggtcactgaagccacctttgctgacatcagtgaagcctaaaaatatgataagaggggctagaacaattcacttgttctagcccctcttatttttgagtttaatctaagtattgggccaaattagcaccagaaatgatgacttgttccttcagcaaatttggttctttaataatattatgaaccaccgtttcgggtaaaacatcattttgtgcgagcatttgcagagcatcatcttgcatcacgacttttttaaccatattatgtattttaatcgttgcaacatatttttgcgattcccgttcttcaaccacttcgtagttgccgtaataatgtttatctgtcattaactcatccccttaaggttaataatatcatatttcaacaaataaaactaagtaacttatcctataataaggggaaactgttaaaaaataccaaaaaaaagcaaaacaataactgttttgctttttccattatagtaaggagagtacaggtctcattatatggcgcttaatcattgttattaaaatacttttaaaaattgactaaccttttgactaaccacagaaaaactaattgctatttagcgtagcttaatacgaggtgattaatatgcaagtaatcgaaatagaagaacttggtctttttgttgaattagaaaactcaactattaatatagtaggaactgaacattttggattagaattccaaaacgaaatactagctggcatctggtttcagacgttactcgatttagtggagacactgcccgaatttacgttataatctgattgaggtgatcgtatgaatgataacggacataagattttagctgaatttgaacaagcttataagcggctaccacgccatgcttattcgctgttagttgtaaaggatacttaccatgactcttacaacttctatttagaagacgtgtatggcgcaacttggagcaacgggcttggttcagtgtcctttgataacttagacgaatacaagagtgtactaaagaagctgctggctagtggcttgcctgtcgagtatcgtggttttaaggaggattaatgatggtcgctttagatttaactgggcaaaagtttggtgagctgaaagtaatcgctagaaatggcaatattggaaaccacgctgcgtggctgtgcaaatgttcatgtggcaatcaaaccaccgtgccgagtaacaagcttaaatctggcgctattgtgagctgcgggcacttaaagcgtgatgtaaatcacactggattaaggcgtggatatcagaataagaagaaaaaaggcgtcgccaccttcctattagattcgaaacgtaaggttagatcggatagttcaactggtataactggcgtaaaggtggttaaataccgcgacggctcaatccactacgctgctgacatgactgttaaaggcaaacggcaccgcattggcaccttccctactgttgaagaagctgctcaagcgagacaagctgcggttgatgcacttttgaatgatttaaacaactaatatgaaattagcgttgattaaaatccataaaaaataagcctaacccaccgattaaagtgagttaggctatttttataggcatgaattagcgacgtttttcccaccgaccgtaagacaaccgcatttaatcatttcatccatttgaacatcgagttttaccatgacatcatgaatcgttctcaaatctgctgtaggttcgtgacgacaaataaatagaggtaagtcgttgcgcgtataatagtagctcatgctaccaatcactccgatgtctgtcttatgtaattcgacgttacccgtttggctcaacgtcaaagaatactgattgttaattcgtgctggttcaaattgtttcatttgatgtacccccgacttttattctgctattatcttacaacagaaaaattttgaattacattcttgacatggtacttgtcgacgattaattgttttctcttattaaaatggccgaaaattgagatacctgcagcttcctcggcaacatacataaaattcaacgcgcccttagcaactaagcaattataagtttgttcaggtgttttaagttcaaaccgaacaagatatggtgtgaagctaattactttaacagcgctattgatagtcccttttaggctgacatattccatcttgaccactcctttatgagctttattatacgaacgtacattcgtataagtcaagtaaagaaatacaaaacagtttgttgatgataatttagagcaaaaaaaataagcctaacccactgattatagtgagttaagcttttttaattgcttttttgccttatatcttgctttgcatcttctgtatcttgttcttaaacctacaaatcttttaattctgatcattgctttttcgataacagcaatcaataaataacccaattaatcccactgctaaaacaaagatagcacttattgtccaatcattaatccatggagaccataactttgtattataacccactttagcatatacaaatccaaatacaaaaataaccaaaaaactaaatactataagaaatctagtcggaaacgacgtattatagttctttcccattaattttgaaattccggttaacaacgctaataagatcatatacgttccaaacaaaaatacagatcctagcattagttcgctcccaatactagaggaactagtattcttgatattgccaaatacattgcctaataattgtaatccaccaaacgttgcaaatgtaatagatgtgaatattcctagaatagtaacaaagtcaacagttaatttttctattttttctcttgtaactttcaaatcacttgttaactcgtttaaaagctcctgactactatctatattggaagctaacttttttaattcttcattttgccgttctattttagcctgttgtcgttcgtcgattgaattgctctgtattccaaccaattcaatatggtctaatattttcaaaaaatgattccgtgccctgttagtatgctcttcgtttatctcagtactaataaccgcttcgtctaaggcagctttaaattctgatatttcttctacatcaaatgcataatgacttatcggtgaataccctatatactcgtcagtatctaaaaacttccatatattatcaaaataagagctacctttgatatcatcaggtaaaaaatttcctacttctttaagttttgttaattcaccaacaactttatttgctatatcatatatttctaatggcaatactaatcccccgtgatatcgcccaatgcgtattcaactttttcactcttattcttctgattttctatccagaaagattgttcatgcgattttttcacaagatcaaagacattttcggttaaaaattttgaaatagagctatcaaacactttgtattcttcgttgtagtttccttcaatccttatcggagtacttccgaaaatactaaatctaaaatataaatctggaactactggaccatattgccatgtttcgaatggatcatcataaatattttttataaattcatcttgtccattcttagataaataatctttaatcacaaaatacattactttctgcagctgcaaattagtaattggtaaattattttgtttcgctactgctactatatgatcacttaaattcaacatagtcatatcaaaacatcctccaatcctaatatcactattctcttcacataatgatatattactatacattaattagcaagatataccaattattttaatcaatttttttgactatatttttcatcgcctatctatacctatatctgcttaaattcgaaaaaaccatagataaatcatagatttatcgtgaatatcattataatgtaaatcgcaatctataactataccaatttatgtacagccctcaagtgagggcttttttgatgctttatgttagtcaaacgatacccaaacattattggctgttccgactgggtgaaccggcatccataccgaatccccgttgttagttgtccagtggcaccaaacataaccgtcacggactgcaacgcgatcatagtagattgtcgtgtgagcaggcaacttaccggcacgtactgcgcttaaagatggcgtattaagtcgagcttgaataggttgattaccattagtaaagtgccaattttcggcccattcattagaattgtttggctttgtcggcgcatgtaccgctggtttaggtgttgatggcactgcagcggtgccatcttcaggcaatccagtctgtaagtcatgtgctaacttctgttttgtcaccccgaaccgggcaagataatcgtagggatcggtgtggttaccccaaatattgctggtgacccataagtgcgtcttaatcccacggccgttaccatctagtgtgagcggaatgccgtatttaatcgcactgttacgggctaagttgacataagctgcataatctttggcgaactgggccttgtcgtacgtatgggctaattcgatttgaacaggtgaaccagcattggcaacggcccccgcaccccatgctcgatagccttcagctccaccggcgaaaaccttgccgccatcaccgacataatattgaacataagcgcccgcagatgaccaggcacgttttagatagctggcgttttcccatgcttttgattctgtgccgacatcatgcaagatgatgtagttattgctggctttataagcagagccttcgttatcggcgagcttataggtgttgtcgattgagtaggcttgtaccccgcctgctaagtttgtggcaaataaaatagccgccattccggcgactgctaatttatttaattttttcattttggatctcccttcgtggtgtcatagacgacaccaattaagcctaagattgtaagcaccgtattaacgatcccttggacttggctggctaaatcattgctgaattcaatcccgaaaaccttggctatttgctgaactaacacgatgactaacgccgtcatcgaagtccacaacacttttgaatgccaatctacttttttaatcattaattgttaccctcccataaatttattcaataaaaaaagacctattggaatcaagatggctgtaatagctgtcctttgagtccacttagatctatcatttaaatcttcaatatctttttgattttctttagcaatcgaataagccttgctagctttgattgctgttgaatcaagattgctagtgttttcttcgacgcgggctaaccgctcccgaatatcgattaacatttctgtcacgtttaaatcatctttatcgttgctcaaaccatgctattcctcctttccgtcaactatttcttgcataatcttagcttgttcttcgaagcacttcgcctgcatcttcgccaagtctttgttaatttcagttagattggctaaatacagcgtgttgtcatcaatatgctgcgacataggcatcatcgtaccatcgcttttaactgtggcaacataggtcacagcctctttcccatcaataaccgacgtcatcgtcaagctaatgctcttttgattaacctttaacatattaatcctcctattcatttccaagtgagtatgacacgccttcaaatgtgtgtcgtccgccttgtggaacaccaataacaacgaattcaccattcgggcgcatctcaatttcaccagcgaccggcacattacccgtccgcataccaacaaaccaacggttcttttgaggtcttagccctggcgttttgattgtaaacagtgtgtgatagtccccaaatgcgctagtaggtaataatatctcgccagtaacccaaacacgcccccatcttcgttcaaacgcgattgtataagtcccaccggcatcgctattagaccatgattcaggacctattctgattaaatcttctggagtgagataaccggacccatttttgttcatcgaataaaaactgccttgaagaagtgaccccaaggcttgcacatttccatcttcgtcagtgatgtacgaaactagcccatcaggttgaatctgcgtgtaaccacgctgtgccttggtacctttaactttataatcgacggtgtacgaaccgttaccaattgtttgaacgccttcgagcaatggaccatccttaacgtttcctgtatactcctgtgaaaaattagatgtgaactttgaaccgttaattacagccccattaattgtgttaccgttcaatgtgctgatgttcattgcggattgctgaattatcgaatcagcccatttagtgccgtcccaaatcttaaacgcattaatctcaccattagcgtccttaacccaccattggtcacccttctttgggttagtcggtgcagcggcttgagcgtccactttagttactgcggcaatcttgctgtttgtgtcggctaatcccttgttgattgagtcaatttgttgttgggtgtcctcgggggcaggtgaccaatctgttgctttatttcctttttccaatttctgcttgctaatttccaacgtcttcccagttgttgtctcccaagcccctgagctagcgtacattaatagccgtacaccggctggattatttggcttaaatgtccatgagattttaccatttacgattgggacggacgcggtgttataacctgttctaatatcggctgaatatatagctaaaaatactgagctatcgctaccacgcacatacttaacctccgctgaataagtccaatattcattggttaagtttccataaattgttatataatgttgagtgtcgccattgattgttatggtctggttgctgtttttaatatagttacgaccgccaataaccagattaccaaccagctcgacccagaaatacttagtcgggtcggtactgtcagcttgtgtaaagtcgctgtacgtgccaaggtatccgcgatttgttgggtcagtcgcgctaaagttaatcttaccatcttttgaatccgcccatgcttgatgaaagtatggtgttttgccatctacaccagctttacctggggcaccattggcaccgtctaccccgtctttccctcgtatcaaactccaagcatacttagtggtatctgttgaatcagctactgtaaagtcagtataccagcccatatacggtttattagctggagtctgactgaatccgccacctttgtcgttatcggcataggcaacgtgcgtatagcttgtttttccgtctgcacccggtttacccggaataccaatatcacctttaggaccttgggcaccttgcataccttctggacctgtttcacccttggtgtatgaccaaacatagtcgctagggttattgctgtcagccttcgtgaagtcactataaacacctatatagctccgcccagttgggtcatcggtgctaaaatctttcgttccgcttacattatcagcataggcgaagtgagtatagctagtcttgccgtctgccccagtggcacctggaatgccatctttaccatcgttccctttgattaactgccagtgcccagcatagtcggctgggttgtcgcttggtacgcccgttggtttattagaaacaatcgcgacatatttagtgtcagctgtcggcgtcgatgtcatgcccgtccctttgtcgtctttggcgtaacgaatccatgtgtagtttggcttaatttggtcagctagctggtcaatcatctctttgatgcgtgggtcaatctgagattctaacttctggtagtcgcctagaataccagtgtcttgcccgctggccgtatagcaattagtcacagattccactcgagcgcttaaatagattggcgggttgtagttgttatgtgcaatttgaacctcgtcaccaatatcggcattaatatctaacagattagcttcataggtttcgctcggggcattacgctttttaagctgtgtaatagtgcggttaagcagttcattagggtcctttgtttcgtaattgtaaatactagtaatgtagccttttgtttcattttgattggtggtgtcaaaaccgctataacgtgaccacaccaggtgattaagtcggtcgtaaacagccttgtcgccttttggcgagaaaaactgcccgtcatcatagcttaagtcagcaaagtcaatcgggggcacatcttctgcattatcgccatctttaatgtcaggttgcgagccataaccaatcatcgctgtacataaatcttcaatcgatccagagctttgcaatgattttaaattgacggcatcgatgaacctttgctgagtcattgaattgccaacttttctgtagatgtttacgacttgtttagttacgcggctgccatctaactcgacttcaaaatcaatctcagcaccgtcaaattgattagcaatgtcgccgaggcgtttaagctgtgtgtcggactgtccgtcaaacttaagcccacgagttagattgctgatctcgttaatgccgatgctccaaccggtatctttcaaaacaagattgttaaaataccagtcaatcccgtgtgattcaccagtgtagtcccatttatcagccgtctcattgagcaaatcgagcccaatatcttcggcatgccacgtttgggttaaatcatcaccatcatggctgattaatgtatacatccgtgctttgtcgtacttgtcacggaatacaacatagttgccatattttaaattagttgcatcagggtgcttctgttgtaccgaaaaatcataggttgaaacaaccgtattgttttgcaaaacgattgtctgcttatcgttaaatattggtaagctatcctttgagtcgcttgaaggcacgcaaagtacgtgcaaatctcgacttaaaataaaccattgcatttgaacgctcctttgctattatttatttttgaatggaggtgattatttatggatattcgagttaaagaaatcattgaacggaaccatattacagacgaaaatttagctaacgcactctctgaaatttatgagttagctagacaaaaccctgatattaataccgttcaaagaaaacttaatcaaaaacaacgaaacgatgcccgattgaacgggcttcgttagtttttcaggcacaccgttatggtgtgcttttgttatttaaagccatttttaatacttttgaataaactaaatcactcaaagctggatcatctaaataatcatttattaaccccaccgcctcgttatatgaactggtaaccattactaattcgttcgcgataaccgatgtttgattgtcgacatcaagcgttaatttttcaaaatttttaataatttttaacttgtccattgattataaccacctttctctatattcaaccgtcacttttggcattgtcgcgaaatccgaaacaacgatgcctaattcattcttaccaacgcctgcaattaagggttttgagccaatatcaacgcgatcccaattcgggacttcgttaattgccagcttgtttgatttactgtccaagacgattttgtcaccgacattgaagaagttaggaatatcaatccaagagtcaatcttgtcttcccgtaatgtccactgcattaaccagttgttctgtggtgctggattgttgtaccacttgccaaatccgacggtataaaaatagccctcactgtccgcgagagctgtatcgacgaatgtttttgttgtgttgccgtagacaagcatgaagttatcgccagctttagtcatactcataaagccgcgataaccaacgccagtccaattattatttgcttcataaactttcttatcattaacaaaagcaataatctttgattggttaaccgtacctgattggtccatcagaataacgctaaacaggcgtttaccgtctttatcatgcacggtgtggacttgaaagcctgcttcaggagtctgccatgtttcgaagtcggtattttgccacaagaagaaacttctagcaccaattttgccatctttggtagccggaaaagtccaagtaatcgaagggcctgcccatgattttaccgagcttattccgtagtcggtaacttcaatgccgttggcagttttggcaaccgttcccgtttgggatagattgcccataaagcttggcaaaggattacaagatttgttgttgagctgacctttgccgaaaatcgccacaccatcagacacaatcatctcagacggtggcagctgtaccccgtcaacctctgtcggattgccaatctgataatagcgaccatttaatgtcaaccctagaaaaccgttttggctcgtcatttcagttgtgactttaactggcgttgaatcagtcccgttgttggtgaatgagattgtcttcgccgcgccattgttggtggctgttttttctgttttggaataagaatgcccatctggaaccagccatttgatggttcctttgccaatagtaaaagcacgatctaaatcgatttcgccgtcaactagtccattccaaacttcgtcaggtctgtcactaaaaattagcggtacaggttcttttgaatgaagtatagccgacatcgagatttcaaaattccttctgttcattgtttttacgacaaatttaataggaattattcgctctttcaaacggctgcttaagaaaatagatccgtctctctcgcctatttgtgttacagtgttttctgtttccggtaaaatccctctttcaggtaaaaagacaagttcgtcatttccgacttccacgccgtttacgtttaatttaaccattaggttctaatcccccctaatcgactttggtttattttatttctctcaatttgtttatcaacaacatcagcaacccagctaccaaccgcttgccgattatctaatacaacttgcccaccaatttcaccattaaattcgacatttaaactgccgcctaataatgtaatcaatgtatcaattttgccttcaatcgttgttaaatcgacactctgattaatatttgttgtaatatttgagctccgatttagctcgcttgcttttaacaacgtacccaaagcacgagtattattagcagtaccatttttaaaatgtggtattgagcttagaatccgttttgtcttattagccggaacaaccgttgagcccttttttaagttaggtaaaaaaacgtttcttccagaaaaaagaagtggattgccacctttaggtataactaattcttgaaaatttgaaccactttgatcattaacaactgctgggccacccggtgcattatttgtcccgtttttgaatccgagaattttagcaacgcccttaccgatgtttgccacaacgtttagtgtcttagtaatcgtttcgttgccaccaaaactacttacagctcgtttggcagcggccgcatttgatgaagcatcatctttagcacgtaaatacttcaaccccgggttatttcgtttgaactcatcaagctgaccattaccggctacgactgcgccacctaatccagcatcgtgcgctttgagtcctttgctctcagggttattttgcctgaaacctaccaacttgccatcggcatccgtaacagcaatccctagaccagcatcgtgtgcttttaatggcttgctaggaggattattagatttgaatccatcaacttgggcattgccagcagcaaccgcccctgccaatccgccatcatgagcttgcagtggtttacttgcaggattgtttgtcttgtagttgtccaataagatgccagcatcaattaatttctgccgagcatctgtattattgattaataaatccttttgtttttgaggcatatcattccaagcgccgtatttgataaccatatccgctaaatctggtgcacctttagtgttaagaatggcattcttttcttcatcagaaagtccttgccacacaccatatttatccaatatgttaaccaatggcactgtcgctttgtccttaaccaatgcttgttgctctttaagtgtcaacatattccattgaccaccctttaaaagtaaattagcaatcggtgacgcatcgccgtggataatagcttgctgttcttttagcgtgaattggtcccagataccaaactgttgaattatgtcagccatttctttattgcctttaacagacataatggctttttgttctttaaaagttaagctatcccatctgccgttagccacggccgcttcaccaatcattaacttagcattgctacttaaattggcgtgtttgaggtcataatgaaggtcatcccagcccttttcggattgagccgctttgttaacttcctcttgggcgttggttttgaccttgccagtcttaggattgaaaactaaactattccactgttgatttgctttagcggttgcttttgacatgtttgcagtatctgctgcaactatccctgtactatcggacatgttttggctttgagttttaacaattttagccgcttgctcgtacgtatacccaaaatttaataaatcttgagtaatttggtcttttgactcgccattagccttggcaagtttgaatacagacgcaaccatgctttctgtagaagcgttgtgctctgctttcaattgcttcatgtatgcaccgtactgtttagcagaaattgtattgtctgaatatgccttcttaattgttgctgcttgtttttgataagctttttcttctgatctaaattgacttgttaaatcatcaatcgctttgccgcgttgttgattattcatcgtatcaatatcgccatttaaagcagctattactgacttcttagccttgccgccaatttgtagaagcttaacttcatcagcattcatacgtgtacgcccattaagtacaatggtacgttcatcatcggtgagttttgaaacatcgccattatgttttttgagcacagcttggattaactcattttgttttcttgcgtccgctaaaatttctgcatttgcttttttacgttgtaaaacatttgcctgcgcatctttcttggcaaaaccaggtaggtcattaatatcatcttccatttttttaatggaattgttagaatctgtgaccatctgctcatacatgtcagaaaaattagaagctacttgtttagttgtcgtttttgtattcccgttaaagccttctagagcggcagaagcttgcgttgaaaatccttgcattttagttagcgatttatcagcggaatcacttacatcagatccccaacgcgaagttctattagccgattccacagctttcttaccccaaagctcccaaacagccacacctgcgccgacgactgcagttgttcctagtacatatggatttaatagtgacaatccactactaaacaatcctgcacccttaccggcactatttaaagctgttccggcaccttcaatacctaactcggccgctttagaagtacccgaaacacggccaagcattgtaaataaaccacccaggccagaactaactgaaccggttactttgagtacatttcccaaagcacctgatactggtccgatcgcagctgcaaacaatgcccatttaataatggatcgttgtgttgcactgtccatgtttgagaacccacgaatcatagaagttagtttttcaattaaaggtgtcaatgtaggcaataacttttcgccaaattcaatgcctaaaacatggattgactctttaaaccgtgctaccttggcagcctgcgtatcgttcaactggtcagcaatttttttggtggtgccggctgaatcctgtgcacccttggtgtatttgcgtaattcatcaccgccagcagaaattaaagcgttcattccggcttgcgcttcagtaccaaatgccattgcaattgatgatgcgcgttgttggtcagtccaaccttttgtgttgttcttaatcttgtcaataatttcaggcaaggttaaagtaccttttttgaaatcttcaacagaaacgcccattgctttaaatccagcaacgttttgtttcgatggtttcattaatcgagttaaagcgccacgtaaggcagtaccagcaaccgaaccttcaatacctttgttactcataataccaatcgcagcagctgtctcttctaagctgataccagcggcatgagcggatggtccgacataagtcatcgcttcacccatatcttggaacccagcggctgtcgcattagcaacgtaagtcaaactatcggttacacggcttgtattcttaagcatcccagttgttgactctgtttttaacccgaattgttcaagaactgaagtagaaacatgcataacgtcgttaaagtcatcaccagatgccttagcagcgttcaataccgctggcatagcgcccattgtttgttgagcagtataaccacgctttaccatttcggtcataccatcgttaatagcgcctgtagatacaccaaattgcatagcccatttctttgaagagctgctcatctgatctaactcacttctaacagaagccgtaatcttaccgccattggttaataacgggccaatcgcactaatctgtgagttgaaatcaattgcggacttagcagcagcggtaaagccacctacgattggcgtagtgatgccaattgtggcttttcgacctaacgaagtaagcttatcacctgctgtggtggtggcattgccaaacttagttagcttttcgcctgctttagtccagccactgtcttgaatagcaatcgttctagcagtagcttgcatcttagcttctaatcttgaagtagacgctgctgttttgttgtactcgttttccagtcgagagagtttatttttttgctcatctgtcgcgccgtttacgtctttaatgctagatttatagctttcaaactggcttttttgttgagcaagcaacgcgttatattgctgtaactgtttgcccattgtggcatagttagactttaagtcattaatacttttgccactcgatttaatagccgtttcttgtgctttaaccgcattgccagtagctttaatctgttgctgtaagacacgtgttgactgcttaaaggggttaatatcaagcgaaacagtacctgaaatgtgtcctaaacttcctgccatttattatttcctcctttctagtaaaataaagaaggaaaagctttatcaataggctgttccttctcttcttctggttcatttaacttaacgattaaatctagatcatctagtgttaaatttaaaatttctttaatcttgtaaccggcattgttctgtaaacttttcatcattgaaaagtagctatcaatagcatcttgaatatccttgctggttacgttctctataaattttcgctttcaccgccgagcgcttgttcaacaaatctattaacagtggcaatattcttggggtctaatccctcataagcttcctttaatgagaattgattgtcgaagaatttagacaagaactcgcagatgtcacttaagttgtcttttaaatctttagctgtttctgattctttttcggtacgtttttgttgttttaattgaagttccaatgccaaaagtgtgtccgccaaactaagtggtttagttcttgtaaattttttagcttcaccattaatacttaattcaatttccatgtatagaacctccattgattaatccagccaccaaccaactcaagagagtgagtgtgctcttacgatctatttattagttgaaggtgtaccgccgccgtcaggtggggttactgcttggccgttaaataccatcttggtaaaggcatcaagtttaaagtccttattatcttcgcgaccgatgaacaacatgtcttcttcttcaccacgagccacgaagttaccagtaatagaatcttcggcaacttcaatcttgtcttctttggtcttcaaatccataccaggcaagttaaatttaccctttgccaaaccaacgtagcaatatttgttatcgtccattaaggcacggaacataacagccacatcaggaactttaatcgtcttggtgtaacgttcaattccgttttcgaccgtaacacctaacatttgttgcttatcaattgtttgtaaatcaaccaatcctaattcaagttttaattcagtaataccggctggaataaccaagtatgggccgtcatcggcatagaccgtttctagttcgttagtaatgtctaacttcgcagaacgcatccctggaattttaaaaatctcactgtttgttttatcgtcttccacggttgcgtattggaattgtgatagaccaattttagctttgctcattataaatcctccctctaaatagccccgttaccatgatttgttctgggtaatcagggtcaattgaacgttcaggttggtaacgttcataaccatttttgtgtaattcttggtaaatcaggtcttgcataagtgctagaccacttgtatcttttttgttcacccagaaatcgacttggacaaacgtgtccactaaaaaacgctcattatctgcataatgggcgtcttcttttgggattggagtcactctaataactggattagactcttttttttgataattatccggaacggtaaacgtataaatcggcacaatatctaatggttgaccacgaatactgtccatcaaactaactaatgtagttgagtttttcaaaatatttctaacgttgatttctggtaaattagtcatctaaaagcctcatttcttcggcatatacttctagaatctcatcacgggattcttcttgcgctttaattgaaaaattttgtgctcgttgcttctttgtccctttgtctgggaaatgggcacgccaagcgctcttaccaccataaccaacttgcttctcaaaacgaccagttgaagactttatagcgccgactttaacatcactggcaagtgcaccagaatctacaggtgtgtcatcttttagatgtttggcgaagatttcagcgcctttattaatacttttgcgcgcctttttaggtgcttcaacttcaagccttgtgacgttagccagcatttcggcttccccttcaacactcattgaaccgcctcctgtgttgagatttgaataatatctttagttttgtagtctggatctaacgatttaatttcatacatcgtatttcgccatttaattcgccaatttgattcaatctctttttttgtcttaaaggcgataataaagactggtgactccttgcggtaaccaatcttatttccctgactaacgaactcgcgaatcggcaattttggtacttctgcccagactgtaaactcttgtatttcagttgaatcgacggggacgccatcttcagtaacacctggtccagtagaataaaaggtaatgcgttcgttcatattagttgtccgcatcttcgaccccctgttctgcacgtaactgattaataatacaaatcactgaatttgctaaaatcggtcgataactatccgcagttattccacgaagatagtagtcttccttgacttgcttcatcaaagcaataaaaaaacgaggttcattgatgaactccgtcggccgtgactctgatttaattgcccgtgctaattcaagcgctgaagcattaactagtgattttaataattcatcatcaaaatcctggtcaattttgcagtaattcttgagagtctctaatttttctggtggcaaaagcggtttttcttctaccaattagatcaccaactttaatagctcggatttggttgtcacgccagaataatcaataccggccgactctaagtaggctttaatttctggtaccgtattactgtcggtcggcttgtctggcgctaaacttttggggttgttgattctgtatgtgttaagaaataaccggccttttcatcagcttttttaacatcgaaacgagtagccacttgcaagtattgaccatagatttcgttgtcaacccaacgaacagtaatatcagcacgattagcaaagattgttgcccgtttaatgtcacccaagaatgcgtgagcttcgccatctgcaccaagtaacttgtctgcaatcaccaatactggcattcctaatagcatcttgccgcttggagaaatgattgaatcttgcaataagtaacgtccgttagcgtctttcaacgtgtccaaccaattgtaatagctttgagttgcaacgattgtgcgtgcatatgctggatctaaagcaacgttattaatttgtttcaaatcgtcaagcctagccgtttctttagccgtaaaggtctttaaaactgttgaaatagctgcatttgttgtatttagcttttgacgactagcattttcagaaacaattgaaattaagtcaatcgctgaatcatcaattgattcttgagacaacggaatcgcgccacgataagtaactacttcccatgagacgtcagtaaagtcaggcttagctagttttggattcttttctaattcagcaactgaagataaaacggtggctgtattttttaaaattggatattttccagaagcggttgttgctgcaaatacgttcgtaaattgctttaagtcaacgactgtttctagttcacgttgtgggttgtaactaatcgcaaccggaatcgttggttgcacatttggactcgtaatgccgtctgttttagggtcgataccatctcgcaataatgcatccgggactacaacttctttaccgcgcattgtaataccatcagtaatctcgcctttactacgaatataagcattaattgcatcacgtttttctttcaatccgtcttgcttgttacgagcttgagcaggtttacccttaccagcaattgcgtccttgtacaactgcatggtttcttctccactacgaatttcttcatttaatttatccaattctgatcgtttagctttggcagcagctaaatcgtcatccgattcagctttttcgactagcgaacgtacctctgtgtttaatcctgttacttttgagcgttgttcatctagtttagtttgcaacgctttaattttttcgtctaaagtcatgaaatgattcctttccgccatttttttggcataaaaaataggcatctgttaaatgccttttaatagttgtttcttattcaactctcttaataaatcacgtttttcttgtttccatgcaggttctttgtgcaacgattcaacaagtgccttactgcgtgcaccaacagtcacttccgtatccggataagctggcgttgtgacgactgacacgtcatataagtggtcaatcttccgaattgttcgcgtgtagtccacaccatcttcggttgagtcttcccattcttccgaaccgtcttcgtcaggaatcgtaaaagcgaagctacattgattaatcacgcccgccttaatgttagtcattaaatcgcgcgcaaactgtgtatctgttggtctcacgcggaatttaagacctatgttatcaatttctaaatccaaattaacacctgttcgaccgagcacttgattttgatcgtggttaaaggtggccacaacgttactaacgtcagcatcttctaaagcgttactatctagtatttcccgaaaccgaacccaaccgcccaaaacgtctgaaggcttgttaaatttaagcgcgtacccctcaataatcgagtcttcagaatcttcattctgtcgcagattaatcgtcgttgttacttgtcgcgtttccaaaccgattgtcattcttatcaccccctttcattttttggtattcatctttcatatccaatgagacagtgttaagcgttgattgatatttatccatacttggattagtcgacggcattcgcccagattcaatcaatgctttatttggcgttagcagactgccttcaatagcctttttagcgtcgtcaatcgacaagccagtctctttgcgcgtgtcaacttcaaaacgtttttggtggcgttccaggtcgtcaaacagcttaagccctagctctgccacgattggttcaaagtaatatggtaaatcagatttaataaagtcttcattcagctgtttaattgactgattggggctgttaactgctaatttatacgccggtacatgcaatgctttagcaatttgagcggttgaataattattggagttaatcaactgtaaaacgttcgtgtcaacttcgagtggtttatattccatcgtttcatcaacaacaactggcgagccgccagttgcaccttgctgtgcatattcaaaatcttcacgcatcttacggcgggcttctttgttgagtttccctttggcgtttaaaatagagccctttagcccactcttaaagaatcgtttcaatgtgtcaatcccagactcttgcaagccaatctcatcacccaaacttagcagtggcgaccggccatgaattccgtcataactgaagaatttccaatgaatcacgttttgagcaggctctacaattgaccgatttgcgttattcggcgtaaattcataaatcaagttattgggatttgaatcatcaagaaatgtttggcttggtaagtagaattccagcatcgctggcttatcactaattgggtcacgaacaattcgagaatagctatcgcctgatagaatggcgttaaccgccattgcgaatttccaatgatatccgtctaaattagcattaggtttcttgttcagcaggtagctcaactcgtcacctgaaacaatatcgcctgttctttcatcctttattgcatatggaaaacgtgcaacattacttgcaacatgagagacggccgttaatacatctgagtttttaagcgacgacacgccgatatatccgccccgtgagtagcttggcaagataccattgtctaatagatcactagcccaatctcgctgttcaatgcttctaaaaaatggcaatttctatcaccccctttccgagacgagcgagataacaattagaaagataccagaaacgattaagccggttactatgccgattaaaaaagccgctatggcaatcaacaccataccaaccagcaatataattctcgagctattaatttcaaaccatgtaacaagtgccattagtaacccgataaattgcccatgtttttttatccaattcactaattaatacctccttaaaacccaaaatcatcgccaaacacatcttcattagtgattgtctcaatgttctgtctaaaacaaattgcataagcatctagcaacgcgtccagggcgtcgattttgttactgtatttattcttatcgatccgaacgccgttgttatcagataaaagaactgcattgttgattgccgcagtgagtatctcgttaccagaatgttgaatcttcttttccaaaacatcatccctaaactgtttcgttggcattgagagtgtcaacgtcccctgtctcacggcaatctgctcccattctggatggcctttttcaatttgcgtcagcaaagaaccgtattgcgcggggtcaaagcaaataccttgcacatctagactattttgagtaataaactcgtctagccagctataaacacgctcgacatcaataacacctgattctaatcgcgttatctcacaccggcccttttgttcgagcgacctataatcaatgcgatcggatttaatcttggcatctaacccatatttagtccctacaaatgcaaaagaatcagcataccagtaaccatccatcgggattagccaactaatcgcgtataaatctgatgttttccctacatcgacaccaatccatgctttttgcccctgaatatcaatcggcataacttgagccgcattccagctttcaatatccatgtatgaattctcttcggcctgcctccacatgttaaagttcttgattaacttgctatttagcgagccatcgccacgagcctgctttaatttagtggttagataatcagtaatctgctgtttaagcgattcaacatccagtagcggattagatttaatccaggtgtctggattgtcaatctcgctaaaatcatcttgctcagcaataaaagcaaagtagcgttcggcttcgatttcgccaagcaaaacttttttggcgtacggataattttgaacgaacataggagcattcatgtcaaaaccggcagtcgagataataaatgttaagtagctaggtaacagcacttgtcctgaagccagtgtttcgagcatatcagtggttttagcattcgcatattcatcaactacggcaacatgcggttcatacccatcgactaaaccggcatcacgagagaatgaacggatgctagagccgtcatctagattaataatctcatcacgcgttatcttaaccattcgcttgatatcttcatcttttcggcaaagtgcctttaaacggtctttaaccatgttgaagacaatactggcttgtttacggtcgtttgcggccgtgtacagttgtcgtttgaattcaggatttttgccaaacagaaactcatatagcacaattccggaaattaaaagcgacttaccgtttttccgtgccatcgtaataaacacgtcggtaaatcgcctaattgtcttatcatttttgctgacccacccgtaaatcgaaccaataataaatttttgaaatggtgccaatggttgggccttaccgctttttggctctggcaacatttccataaatgcaacagccttgccagctagttcttcgtcatatgtccagttccaatccgttcgttttagatcagactgatgacgttttacagccagcaacacccacttacttgttaacaatgtaccgtctaaaactcggggtatgaatgccggcatcgggtcaacgaacgtcatccaaacatccccttaagcgatgtagatttattatcatcagtcttaggcatattcatttgcattcgagagttaacgttaaggcctaaatcgcttgctagccccttaatgtttttagttgccttgtctagcctagaaataagtttatctttctcgtccgaatcattagtatcagccagcaataacgacgtctctttataaattgaataccacgtacagtaattttctaattctacacgatctagatttctaagtggtaagctgccgattgaattaacaattcgcttatattcatttttggccacgctattcaaatggtttggtgccgttttttgcaattctggtaaaccatcttttgccaatatttcagctttatacttagcttcttgctgcaggatggttagattcccttttgactgtgataatagcttttgttttcttgacatccccataaacacctcctttttgaataaaaatgggtatcgatcaccatatatgtgcttaaaatagatagaatttgggacgagaaaaagaggacgtacgttacgcagcactcctctaactaacccccgttaattttaagcgggggctttaatccaactctatccagtgacgcgtttaaaattatcaaaatttttattttcaaaatcgttaaaaactgaaattaagctttgattgaatcgtttatcattattcaatctatcaatgcaagtttgcctgtcaacgtcgagcaagatgtgattgatgtgatgataaggactaagtaagttatctaatctttcatctggatacgtcagtatgatccacacattgtcgaatgtctgttcagctttcagcttccttaacatttgttcaaagaacagaatgatataatcatgcacatcgaagttcttctcatgacttggtaaacctgtcaacgactgcattaacgaatcatagtcatagattaagtcatgcttagtcttgtggctattaacgtacgtcgtcttccctgaaccaggcagtccacacacaacattgattgacatgtaacgattagctcctttattatgcttaatccattcccgtttagttttaactcggtgacaatcatcacataacccttgtagattgtctggattaagtctgtcttcccagtcatctttgctcggtacaatatgatcaatgaggtttagctgactaccacatctctggcacaatccatagtcacgttgattgacatctttccgtgcagatcgccaaagtcccgagtgatagaaattaacatacttggtctgattaacgtctcgtgcttggttataggccttgtcgttatccttacgagtcacttggtcataaggcacgagtgttggcttaccgttgacaaaggtcagcttgcttggcttggccatcactcaggtccttcataatcccaatctgtgtaatgattgctttaccatattgttccaaggcttcttcaaagctaatcttattgacctcagcatagttgctggtcatgaagtaaagcaatcgaatgataacgaactcaagctcgttagtctcaacgccctttggtacgttgatattaatccgtgggtcaatgccacgcttgataatctcattggcggttagtatgtttctggtcttcatgtgaatccccctttttctgcaataaaatacgccgttcatccgaacgacgcttctcttccttcttctgtttaagccacttctctaaccttgcatcggctttagattgccaatcaggttctttcttgtagctgccttgattcatgtagtacaatcgacaatcaccacctttactttatgcattaaaaaagccataaccattcggctatgacttatttagttctgccattgattgtaaatgttaactgtcctataatgaagctgtcaggcgccccccaaacacctggcacatattggattatacttccagatttcgactgccttacggtggtcgttttttgttgcactaaaaaagacagccgttaagctgtctagttatatttttatataagttataggttgaccatttcacagcctaattttaccaagtaatcattaaccacttcattgtgttgatccaaaaacttaacctttttcttaagccttatagcatttctcactgtattcatagttccacttttttcccctgtttgtataacaaatatctcatcggataaatgtgctacataattatttcgagttaaaaaatttgatttataagtattttcaaacgggcccactgcactaattgccaacccctttgaaaatatctccttaactaatttttcattttctttaggatatattttattgaaatttgttggtagtaccgctatagttttaccaccgtgctttaatgtctctttatgaacctcagtgtctgtcccctgtgctaacccacttattattgcaaaatcattttttacgtatcttttaacaacttctggtactttatgtttatactctgtatcaatagcccttgtgccgatgattccaacgaagtgtttattatttaacaactcttctgatccacgtaaataaaaaaataatggtcgaatatctttagccataaatttatccaaaatattattatcatatttaaatagtatttttgaattagggtattcataaaagtagttaactagttcattttttctttcgttaaggaactccataaacttatcggagtccactaaacttatatcctttttagtaacatgtccttctaaattttggtttaaagcatattcattgctaaatattattctaggaatattctcatctttataattgttaaatagccacattaaaaatgtatcgctaaaaccatattgttttagtatataaataaaaactcgatattgtgttttcattcatcaccagttccattcaaaatgtcgtatattttttttacttcatctttagctgcagtttctttaacggcattatcaccataggatatatcaaatctatctctaacgtatgtatacccagcttcatagacatctcctgttatttgataatcttctttctgataagttactccattatatcttaaataacgaccaagactaacaaaaattatcttctttacacctgttttctcaagtaaattcctagccatttcagttgttgcaccattagttacgtaatcatctattagacagatagttttacctttaagcttacctttaaaatatggattgattgtaacagaatcaaataatcgactcgcacccacctttatgcgttcctcaggagatagataatggcttttctctatctttttatatctaattaataatggcttactaattttcttacctgtcaaataacgacatctgtccttaaattcgacaagtaccttactaggttctgtacctgacgaaggcattgccgcccaataatctatattatacagttcttcatattgcatcattcctgaaatcaggtgaaaagtaagcgcatctttgtaaacctcactcccgtgtttcagtacttcttgaaattgatctagtacatttttttcacgctcatctgcccggtaactattagcagacatcaacgaaatcaattctgatttttcacttatttttaaactataaaaccatttgtgctgattgattaatattttcaacatacttattaattgatcaggttcttttatcttaattccatacttctcagcttctacttcatgttcgctgctccactcgggattaatatataataatttatatgcagcagctatatataaatcatcattacttggacctataaaaattgatttttcgttacttatacttttatctttaaataaagatcttatttcctttctaccatatgcctccacattcgttaaattttcttttagattttgttttaaatttcgatcatgtgtcactatagatatattaatattcaagttttttatagtctttaaaaatctagatatattaaaatagactttatacttaccatcttcaatataaaataatgagcgacctgcaaaataaaccgtccaattttgttgcataatatccccctccaaaatcaatttatatacgcaactatattaaacactaaaaaagacaggtattcaacctgtcctatgcgtatataaatatctggagcaagggtaatgctaacacaaatctgataagtattaaacctatccagcctgtgcaatatcctagccgggactcgaacccgaatcgtgaccgcaggtgcacttccgcgctgctctcccattaagctactaggaccatgcccgcatcgataagtgaaacacaaggttctccttcctcgtgtattcttacgggcaactatttgataatactaatttaacacgtatttaggggctaaaagtgccaactttgtgccaacttattgcatgcctaactctttagccaaatctataaagaagtcttctctacgtctgattaacgtgcgccgactaacattgagtttatatgccaccccatctaaagttaatcgccgtttgttcataaaataaagttccttacacatttgataaacgatgtctgaattagatctgtccaaacaatttgcaacggctctttgctgacgcttcatttgtctaatacgtctatcttcatcaatcctaacaattgtctccgtcagacgttcctgttttcctgcgcttctgccgccaccgatattctcatctgattcaacatagggatgacgaatttcttcttcgcattccttgatatattcattgtagtgtggatagtcccgcaacatatcttcaatatagttaaatgttgatcgtctcacgattagcctcctttaacatttgaattgtcgcctgcgcaaattctagttcattttttaagtctgaattgtaagcagacaactgttccacctgctttttaagtctcttgttgtcagcctttaattgctcatagttgtccattagttaacctccaacaattatggattttcaaatttatatctaacgctataatctttcacctgaactatttccaaaatggcaacagttacatttttcgcaacaattcgattagtggttattacggataatgtaacaaccacttacatttgattattcgttcatgtttgacgattatgcattaatcttcaaatgctaattctcctaacgactgccaatgtggtctttttattttggtttctaaatcatctaaaatcacttcaaatattgcttccaacacgttaactacaatgctattgcctgattgcttgtacattgtgccattagtacagcctttgcgtgttgggttggcctttaacgctgcgttgtaatcctcatcatcaaaccccattaaacgccaacattctttttcagttaacaggcggtactggccgttcccgatactaatgattcctgaatttgggcaacggttctgtttagtagtgatggtccaagcgtattgatcaattggttttaatcgtccaccgaaacttgaaccgttattattcccaatcttgttcaacatactaggcgatgtgattgtatatttatcatccacgttcgtttctaaaaaattagtaatgcttgccatcggtttatgtgccaactggtcaaaatcaaatggatctccgtctaatttagacaccgtgaatagtcgctcacgtttctgcgggattccaaaatcacgcgcatctaaaacttgaaaactactggtgtaacctagttcgttcatttcagttaaatacttttcaaatgaatgaatcatgtctttgtcgcgcacgcccttaacgttttcccaaatgacaaacttaggcttccatactccaagattttttataatacgcaatgtttcccacattaagctagaccgcgtcttatcttcatcgtttcctcccaggcgttttcctgctcgtgaaaagtcttgacatggtgaaccatggattaaaatatccggcctgaggttgtaatcaaccacactctgtggtcgttgtttgttgtcaaaaagcgcattgtaagtccggaccgctttttcatcgatttcaacgtagtcaatcgatttgaaatcaatgcccaaattgactaacgcttttcttggggcaccaatcccgccaaacaattccaatatcttaatcatctaaattagtccctaactttctcatttaataatcgccacgaattactaccgtttcgcaatcgcaatacttacattcagtcataagcttccacctccatcacttaaccctcctaataatcattggttctggcatgcgattctttagcattgcaccgccatacgacttactcttataccctctgcttttcgttggccactctttaattagtagcctgtataacgcctctttgtctttatgtctggtatactctcgaccagatttagctccaactagttgccacatagttagacctccaagccagatttaaccaatccagcgtcccagtgcccaagttcaatggcatagttattgtagcggctacccgcatctacaaggctcttaaattgcttgttgcttatgccaagaaagttataagcgtctcttctgttggcgaaataatgtcgaacagcaccttgactcaatttcacgcggtaaatctcttcctctgattcaatacgatctaaatcgatgcctagacctgctctaatttccgataattcatcttcgcttaactttgtaaagtcaacgtccactagtggtttaagcactctacgccgttgcttttgaatttgattcatactgtcaccccctagaatggtaagtcgtcgtctgcaatatcaatcgcttgcccgttatttgcgactgaatcagcaggcttgttagttttattgcttccggattgcgtctgatttacgttcgaattatcggacgctcttttttcaagcaagctaaagttgtccacgaccacctcagtcacataaatgcgttgaccttgtttgttttcgtaatttctcgtttgaagtcggccgtcaattccgactagtgaacccttgtgagtgaagtttgcgaagttttccgctgacttacgccagataacgcagttgataaagtccgcttcgcgatcaccattggcatttgtaaactggcggttaacagctaagccgaatgttccaaccgctgtgcctgatgacgtatatttaagctctgggtcttttgttagccgacctgttaaaattactctgttaatcattactattccccctaatatggcaagcagtaatctgctattacagcccgtttgtcttcttctggcatcgtttcaaacgcattacttaactctttgttgacccgataataaatgatgtccagcaacgttttgtagcctgtagcaaagtcgttaccagataattccaccgctttttctaatttgtcgtagaacaactgttgtccgtctgtaaaatctttatgatccattaatttcaacctccactctaggtttgtctgaataatatttgtgtgctgctacgtctgttatttggttatcatcgagccatacaagcccatttaagccatctaagatgatcttgatataattatccgcgtcgggcttaactgttggtctaacctcatttgaaagccgtctggcatactctttcttgctaaccgatttctggatttttcgatacacgcatatatcaacttttatcgcgccgctaaatggttgataatcttttggaagctgtttagacgcctgattcttaatttcctttttgtattctcgacttttcaaaggatcatatgctctagcgaatccaccacggttattaaatctaggccgttccgctggaactggatcaccttttattactaatctcataaccttgagcctttctataattagtattgcatcgtgggcacggcttaactgttacgccgaagccttgtgctacatgaataatctttctgcctttacataaatcgcacatttagaaaacaaccttccttttgtcatctgtcgcattggtaaacttaataacaccgtcattcttgacgacgcctttatacatacgacttagtagttttggattgtaaatctttgtcagctcttcactggttaaattagtcgtgataatcgtgcgattgcgtttgttcaatatgccaaacaatacttgttgcacccactcgctcgcttcttggtggttgctttggaatgatgcttcactgcctaggtcatctaacaccagcaaactaacaccacccaacagcttaaccatgcgttgctcggtaaatgggctgttcttgttgctaaatgagtccttaatcaatcgcattaactcattaactgagacgaacaagcacgcagcatctggcttaatatgctcattgaccgcttttaccattgatacagccaagtgagacttgccgacaccaggcacccctgtaatgatcgtgttcgctttataattacggtctaaatactgacccgcaatatgacgcgccttatttaagttggtctctgcttcactgcctttttcaactgcataatttgcaaacgtcgccggttttaagtcgtcatcatcgaagattgagtcacattgtagtacgctgtgaaacgccctccggtaactctgccacgcaccttgcatcacaatagccgtatcgcgctcgtatttgctttgtcgaacacacatgggacagaatggggcgtgcccctctaattgcatcatgtggcaatctggatgcttactgcagaaggtttgcatcgtcttaacctttttaagcaagctaaaactgttacttaaactagaattcaactcctgcatatgagccccctttctgcttggcggcattcgtttggttcaaatactgatcgaacttgcttccaaacaacgtgctaggctgtaaatacttcgccatatcagtccctaaccactcactagacttgttatcgataaccttcttaaagtcgtctagagcggctttctcgtgccatctggctctaattaatttcttgtgtgtctcgacgttcttaaaactcttaccagtcacctgatttaagtagctgattatctcgccgtagggaatagggtcggggttacccgacaatgttttattctctttatctctttctttatctatatctatatcttcttctatatctgttgcgtgactgtcacgtgacgtcgcgtgacttttatttccaagtcttaaccgttcacgttgtttccgttttcgaaccctgttcagctctcgaaccttttccatgccctcgatgttttggtgcttttcccagttgtttattaggattgtcccgccttgaaacacgtcaatcatttcaaaactttttaatgtattgagcgcaagtctaaccgtgttaatcggcttgctaaacaaagtcgcaagcatttcttcgttgtatggcatattctgactgacataaatttgaccgtcgttgtttgtcttgccagctagtgttagtagtctgacccaaatcacgataatagcgtcagcttctggcatagcctgaatcagtcgaatcttttcatcatcaaacatatttaccgttaatttaatccatttgatttcagccatttagctcctccttatcttcataattacctctaatttttaatattctcaacgtctctaagtctggtttaactggtttaatgtgatagaagttaatgaaccatttaagccctttcgtgtgctgttcgtgatgatgatcgttgcataacggcataacgtaccgctgacgatggtcaaccttatttcgattgacacccataccgaccgcgttaacatgtgcaaactgcgctcgcttaccacagatgacacacttacgatgttttaagcattgtagtgttaagtgataatcggtcgggatcatgtcccatgtctttgttctaaacggtatatcttgtttaaaacaaacatctaagataaacgttagaaagcttgctgccagcgacatactacaatcgcttaggctgaaccactcaatgccttttttctggataaacttatatttaaaccatgcttccattgcatcgtctggataacctaagtagtcacagacgtcatgaatcagcgcgtacgtctttttacgttggtcggggctaatacgtctaccgtcttcaatctcgacgctcacagacacctgacgaccgttggcgtacttgctaatcttatagatgtctagctcatcatctgtttcaatttctaatttgtgttttgaatacttaccaagtttgccgtaaaccgtcataactaatcaatctgaccattttgcatcttgaagtagcgaacggcaccagcaagtgttaaggactccatgtatgttaaatttgacacttttttgtcttttgactttagtaccagccgtaactggtcaacatcttttttattcatttgagccagttcagcagccagccagttgttagttttggtgcgaacttcatcttgtttatccttgtatgcgtccaataatgaagcgctctgcccatcgtcatcgtcatccgcaacaataccgaaggctaaacaaagacttgtacgcttagcgtaagtttcattagcaccctgtttttgcatgtttggatcgtcagggaaagagtcgccatacagtattttttcttcgccgcttgaatggcggataaccgtgtaaaccttgtgtgacacctttccattggcgtttgagtcatcaactacaccttgtgagaagctgatgcctgaatctgagactttgatcgccttacgaattgcggcatcaatagcgcttaaatcggcgtacttgccgtagtgagcttctttgttcttagttggttggattagcgcttgttgtgtaatgtaaagtgccttattaagctccggtgttggcgttgtttctaaattttgagttatcatttttaaacctccgttggattgaaaagttccaaaatatctcgtgcagtataatcacagccagccattaacaaatcttgaagttcatagcctcttagcaagtcctttaaagctgattgagcgccttgttcagtgtccttgtactggatacgttgataaccaccagtcgccagctttataaagaagtatttgtctgccggttctttattgattggttcatctggttcgggcgcatgccattcagcttgttttaaacgttcagcattcttgctcatcgttaatacctcatttcattttttagttgtctcgtggtacaatgaggttaatttagttagccaaaactaattaacctggtcgtcagtgtcttcagcactgtcggctttttttgtgccgaaaaattcatcgctcttggtaaacatgtaagttaccattgaggtaataatcatgagcgttacaatcaattgcagtggctttgggatatatagcccagccattaagctaatcgcaactgccatgtacatatgtttattcatgatctctctccttttgttgttggatatataacttgtgcttgtagccttcataccagcggtcagctagttgtttgtatgcgtcccagttcatctagaaacctcctttattcacggaacaagtccattgcgtcatcaatgtcagctactttatagcggatagtgccatcaatgacatagcgaccaagtccgttttgttcgagtttttcaagtagtgctttcgaaccggcgtacttttgtgcttttgtttgattaaggtaaccgctgattgttggtttatcctgtatttctcgaggcttaagggctattgacttagcaagttcttcaaccttctgccagacttgttctgctagctcttgcgatgcttcatcgcttagtattgccgccatggttaaccctccttctctcttaattcgtccaaacttacgccaagcgcatctgcaaatttgcacataaggtcaaagctaggctttttaatacgacctttttttaactcagttaatattccgggactgacttgcatttttttagcaagttgtctttgatttatgttgtttaatttcatgatactttcaatttgcttccacatttttgcctcctgatactacatgttgtatataacgtttgatttcgtacttcatactgtatataatattaagtgaatagtgacacaatccagttgcgctatttaatttaaaaattttggagttgattattatgagcaaacccttcatgctaacgtatgaccttaatagtcctggtcagcgctacactgaaattaaagaaattatcgaaagtgaactctctagcggtgaatggtgtcacttttgggattcgacttatttactgcgaagtaacctttccgcttctgaaatgatggataaactaaaagcaaaagcagattccggcgataaattttttataactgaaattgtaaaaaacgaatattctggttggctaacggaagatccatggaaatatattaaagagcacattgtctattgatgctttgcttcatattccgcaagggtcattccttttacagattcgctctgattagcatttatcgttaaatatctcatcaacgattgattagtttccgacaacttttcaatcgttttttgttgtgattcgataattgcttcatagaattctttatccatgtttaagcctcctatgctgtttgttgttgttcaatagttggtaatacaccgttcagtttaagcagttcatacaaccctaaccggcccttttgcgtccatttagtgttgagaactgctttttctgtaccatcttttcttcgaaccatctgtgtttcagattgtgtccagccgttacgttgatatttggcatacaataaccaagtcttaccttgcttgtattgaacttttaaatcatgtagcagcatattcattttggcacccgacatgccgtaatcttttgcgataactgtaattgacacgagtgcttcattagccagtaccgtatcgtaatacgttgccttgggtgttaactcattaacccgttgttcagcaatcaaacgcccttgacgttcatttttgacttgttgtgccaaatttatgatcgtatctggatttaataagatttcttctgctttttcagctgtaagatatgctccgttttttctgatagttggtagaacttcaccagttacccaccgtttaaatttctttgccttaggcaacttacttccgataatcgcagcatacaatcccgattcattgataattgttgatttcatattcatacccgacaatttggtggatatgaaatcctcttcatcaagtcgttttgtcatggcgtttgtttctgagtatccaagaatatccgctacgtctttgcctacaaagtgcggttcgcctccgatcaatactgttcgaacttggtcaccattaaaattgaatagttgtaaatcattcattttttaccctccttatttaattttttcgctaaaagcgttatttgttccaaaaaaaatatagtctttaggtattgaataaatcttttcaaccttttcaataacgctataaggcaagtcagcggaatcgttctcccattttctcaaagtcggtgctgttacatctagcattgaagccgcttcttcttgggataaaccagatcggactcttaaatcttttaatgtgtgttttacgtttgttggaatagctacgttaatcatttacttccctcctttctatgtctttaatactatcacgcttaaaacgaaaaaacaactatttttcactataaacgaaaaaatattctgtattttatatacattttttcgcttatatgatagtatgggtttgtaaaaagaaagattgatttctttaatcgaacggagagaaataatggctaaagatatcacagaaatattttctaacaacctaaacaagcttatggaatccagaggcgaaaatttaacagccttatcaaatcaacttgatgtatccttttcaaccgtatcggattggaaacacggcaaaaagatgcctcgctctggatcgcttcaaaaaatagcagagcactacaacgtggcactttcgtatttaacgacagaccattctgataatctaatcatttcaggtatgaatgaatataattattttgacgccggtttatccgcgggggttctaaatgatgtcgatccattcacagctaatgatgttgaaacggtcggtttatcagatgttgttatgggtaaatacgctggtgataaagacatctttattacttacatcaacggcgaatcaatgaatagaattattccggacggctctctaattgcggtcaaacaatatacagaattttcagaattatgcgatggcgatattgtcgtattccaagaaggcgctggtatggccgttaaaaggttctataatgacgttaaaaataagatcgtaacgtttacgcctgatagcacaagtggcgagttccgccctattaattacttatacgactcaatgagcgacgttagaattattgggaaagtagtcgtttatacggttaccgtctagcctagtggctttggttgggtgcgattcccaactagataattgcattaaaaaagccctaaagaatcgtggggattcaatagggccggtatattattgctacgtccaaatattattttaacatatttggaggagttaattatgaaaaagttatacaaaaatggttggttttggggatttatagtaatgtttgttttttcgggtttactactccgtagttcgattatacacgttaaacagaatgatagtttaactgctcagaatagtaagttaaaaaaagaaaacaaacaatataagcaattatttgcaacacttagtggacaatcttcaaattcatctacttccaaaaaatcaaagcaatccacatacagtctaaatgaagaatcagtcttggctgaaaatggcactgacaagaaatatggtattaaaatcactcaagctgatcagaacttcaatgaccatggtaaatcacttgttggccaaactgacatgggcgctggtatgaatctatctgcggaaaacgggttacagattactgccgactatactaactatggcttgtcggaaccttttttagcaagaacccaatacttcactgtctatgacgacgagggtaaaactgtcgaaatgttaagccaacaagatggtcaggatgaagttactgaaggccacactggaactactcacttttgggttaaccttaacaaaccatttagtcaaactaaatatattgaaattgaatacaaggacagcgaaattggtggggtttctaattttaaaataaatcttcactagactcccttttcaaccatcggacaagccgacagcaagtgcaagtcttgctggttgatttgcgtttacgcaaaaaaacattttggaggttttacaatggcaaagaaaattaaggacgaaaacggcaatacatacgtgcagaagaaacctttctacaagcgcgtctggttctggattttagtagtaatcgttgttgcagtgggtgcatcaatgggtggtaagaaggacgacgggagtaaggatacaagttctaaatctgaatcagctacaagcgcatcaacggcatcaacggctaagattaaacgttcagactttgacgctgtcaaaatcggtgatttaatgcaatcagccgatggcggtgacacattggactcgcttaaagaaaaattcggtgaaccaaagagcacttcatcatctgaaacaaatggggttaaaacagatgttgttacttgggataaggttgacaacaaaatcggttcaagcatggttattagttttaccgatggcaaagctttcagtaaagatctaacaggtttcaaattaactcgtaaaaataaaattgatttagctcaattcaacgaagttgcaaacggcacttcatacaatgatgttatcaacaagtttggcgaacctgacaattacacagaaacattaattggcggcgacaaacaaacaatggttatgtacacatcaggcgttaaaggtgacctcggcgccaacttcaacatcactttctcaaatgatgctgtgagtggcaagagccaaacaagcatgaaataatgaaaagttcagccaccagtaaagctggcagtgagtgcaaggctcactggctgagttgcaaacaaaaaaaggcacatccccgtcgccaaacagatggatgtgcctaatcaaaaaaggtacgcattagcgcacgctatttgtgtaccctattttaccataaaataggagtgattttaatgtttgaatataaaaagaaccctgcaatcaaggagtatgaaacaaaaaaaggtgtcaaaaagtatatgttccagatctatacgggcatcaatccagcgactaacaagaaaacgacaactacccgccgtggtttcaaaacgcctgccttggccaatgcggtatatcgcaaaatcgaagccgaagtgatgaataaaaaatatgagttcagcgccccacttgaatccgacgccctcacgttcaacgatgtttatcagcggtggtttactgactcatatcggaagactgtccaatcaagtacggtttataagacaaagcaaatctttgattgccacattctaccagaaatcggcaaaatgaatatggacagtattacacctgatgtcctgcagccaatcgtaaaccgttgggcaaccaagtacgctaaactgaacattgtaagtcgctacgctaatcgagtatttaagtatgcctacacgatcaagctgattaaaagcaacccgtttaatcacgtattattgccagcgcgccaagttaataatacaaacaaaacacccagcacgaacttctttagtgctgacgaattggacaagtttactcgctttctggtcaaaggtcgtgccaatggcacggtgagcatgatgcacgccgtgtacttcatcacgatggcttacacgggattgcgtaaaggtgagttattggcgcttgaatggtctgacattgatctagaggacaataagcttgatgtaaataagaccttagccatgaatgagtttggcaagttggcaacccagccacctaaatggctgtcttatcgcacaattgacattaacaaccttgtagctaatacgttgcaagaatacaaggaatttagccactctaatctcgtcttcccaagtgaaaaagacacctggttgaaccttggcaagcctaacaactggttagacagcgttatagatcaaggtgccgaaacgtttaaaaccactttccaactgactggtgatgactattataaaacgtttgtgcatcgtattaccccgcatggtttacgccatacgcacgccacatggctgtttgagaaagataatacgattacacctaaagcggttcaagagcgcttaggccacaagaatattagtgtgacaatggacatttatactcatgtcacatcaaaccaaaaggacaaactaaagtctgcgttagacgtcgattattgagggttagtcaaaaagttagtcaaaaaaggcagcttatccgttggggctgtaaggattagcgaaaattaacttaaaaacaccatttctagcacacctcaaatcaaaattgactaacctttttgactaacctttgatagcaaatataggcaaatatagtaaattaaagagaataagaaaatagcctaatcactgatttaacagcaattaggctaatatcgggaagtataagatattcaagtaaggagagtacaggatttgaacctgcgcgccggtataagccggttcgacggatttcgagtccgttgcattaccactctgccaactctccagaacgttatttattataacagacttctaaagaactgaacagcgtaaaacgcaaaaaaacctacgtgcgcccacattctattcgatcaccagcatcccatcttgatcaaattgccagtcctttgagtaagcgacttcccaatagtaaccatcgggatcactgaaataaccactatagccaccccactcgccccattctggcgctttgatgagcgtggccccgttagcgagagctgttttaaatgttgcatcgacttccgcttgactatgcgtattaaaggcatgggtcacgccgttgaacgttcttggaaatggatgattatctgcggataagccaatatcgactagtagtgcagtgtacggaaacaattctaacttggtcccagtattattaaaaaagacgattgtctcagcattttctaaattcggcgcttgaaagccgagtgcttggtaaaactgccgtgacacggttaaatcctgaacacctaaacaaattaaatggatactattcatcaaatcacctactcgttttaaattaacctgattgtatcaatccgaagctaataacgcaattctccctgttaattggccaattattaaatttattgaatcatatttctttttataaaaaaattcgttatacttaaagaatcttaaatgatagaggtttattaatatgaagatttcttatcgcaaactaccgtttttattcaacttaattttcttagttgtaacggttttacaatctttgatcattctagtggttaacccccacgttacgaaattcatccccacttatatggatgccatggcgaaagtatggtggttgtgcattattgctattattttgcatattgttgcttatttattatcactcgatcagaatttgattttactggcatacttatgtgcaatcgtcgcttacatcatcttaattttagtccctaatctattactagttgcccttttcttgttggtggttagcttgatcatttcatttaaagtctatcatttccattatcgaacacctacttagtcctcgtcggagggctatttttttatgcgccaacccacttaatttatggtataattagtttgaaattaaaacaaaagaggttctagtaatgaaacgattaactgcgattctatctttattggtactttgtttactgccttttgtaagcccttactttttcgataaaggcatgcgcttttctagtaatcatcaaaaaaatccaatccgctttgaagtttgtcggcatccaaaggtccaccacgcagtcgatcgtgatggcagtgaacaaaaattaaacgccttcaaccaccgctgcgaacggttctttaatcaactcacacttgcgcctgaagcattctacgccgtagctagatttcttggatttaccgtctttattctattattagaaccactacttgcactcctaatgaccctcaagaaagtgccgcaacccaaaaaggcacaatcccatactccgcagaagcatcagattgcgccttataaatggcatttattagattagtttaagttcaacttttgataagtataatggccctcttttagtgattgattcgcatatggcgtctcattgagcaacgccacatattcttgggcccgttgttccgaactaaacgcccggatcattttacttttatcataataaagtgggtttgcttgatataaaacaacgtagatccattgattcatctgtcatcacctaactttgtaatccacataaagaaagaccaactcgtaatgagtcggccttttttaatgtcatcttaacgacgagcttctttgatacgagctgccttaccacgtaatgcgcgtaagtagtataacttagcacgacgtacacggccatgacgagtaacttcgatttgagcaacacgtggtgagtgtaatgggaaagttctttccacacccacaccgctactgattttacgaactgtgtaagtttcactcacgccaacaccatgacgtttgataacaacaccttcgaataattggatacgttcgcgagtaccttcgacaacacgcacgtgaacacgtacgttgtccccaggacggaagtcaggaatatctgaacgtaattgagacttagtaatttcttgaattaatggattcattttgaatctctcctttttccacagatattcattaacgtcttgcgccagcggaataccgttgttttgtgactaatcatcacaatttttaattttagcataattcaactgagaataaaagccttatttttcagccgcttcttgcttaatttcttgtaaccagtgcaactgatccttggtcaacgtcatcttctctagtaagtccggacgccgttcatatgtccgtttcaaggacatcttctcgcgccactcgttaatgagcttatgatttccgttcatcaagacttcaggtacctttaaaccgcggtattctggtggtcgcgtatattgtggatgttccaataagccggtcgaaaaagaatccgtaaccgctgattgttcattccccaagacgccaggtacaagccgcgaaatggcatcaatcatcaccattgcgcccaattcgcctccagtgacgacgaaatcgcccaatgagacttcatcagtgactagcgtgcgaatccgttcatcatagccctcgtaatgcccacagataaaaaccaagtggtcttcttgagcaaattcttcggcaactttttggttaaacgttaccccagctggatcgagcaaaataacccgtttgtgccccggattcttggcattcacttgatccatcgcctcaaaaatcggttgtggtcggagcaacatccccgcacctccaccatacggcgcatcatcaaccgaattgtgtttattgactgaaaaatcacggaaatccgtcacttctaaatcaattaagtcacgatcaattgccttaccgataattgattgggataacccattttgaaccatatctggaaataaacttaagacatcaatcttcattatcaatcaatccttctggtacttcaacgtaggctttacccgcttcaatatcaattttcttaacgactgacttcaaaaatggtaagagtaagtctgaacggccgcggcgcttgatcacccagacatcgttgggacctggatcgatgatttctgagactttcccatagctggtcccatcggcttcttcaaccacttctaagccgataatatcaccgtagtaaaactcatcatcttccagatcatcttcgcgttgacttgcagcaatctttaaattatggcccttgaactgttcaacatcgttgatattgcccattccttcgaactgtaatagatagaattgcttgtgttggcgcattgccgccactttaacatcaacaaggccattgggcatttcgacggccagttgcacgccttttttaaatcgtgaatccgtaaagtcagtcgtcgcaatgacccgcacttcaccacggatgccgtgggtattgacaattttaccaacttgatagtatttttctggcatttaatttctccttaatcgacaaaaaacgcctaaataaaacatctctgcttcatttaaacgtttttgttaggcatctacaatatttaaacggacccgtttttggtatggtgctttcacactatagacaatggtacggatggactgtgcaacccgtccctgcttgccaatgacgcgaccgatatcacttggattaacctgtaagtcaaattccataaaacgttctgtctcatgttcagtcaatttgacgtcttccggatgttcgacaagtggctgaacaattgcaataattagttccttcacgtctgtcataacgaatccctactttttagcgaagcgtgcttcgtgatatttttgcataatcccttgttttgataaaagattacgaacagtatcagaaggttgtgcgcctttttgtaaccaatccatgataacttcttcttctaacttcaagtcaactggttctgttaatggattgtagtaacctacttgttggataaagcgaccatcacgtggtgaacgtgaatctgcaacaacgatacggtagaatgggcgtttctttgaacccatacgtttcatacgaattttaactgacattaatgccacctcctattaattctttaacatgtcataatataccaaatttcaaacgccgtgtaaagtgttttttctttacaggacaaatttttttaagatttaaaacgacgcgcgtttttgagacgtttcttcttgtttttcttttgttttttcatcattgaattcatggccatcttacccattttacccttgataccgttgcccattaaaccttccatgccgttaaagttgccctttgacatttggttcatcatctttttcgattgattgaattgtttgatcatccggttaacttcaacgattgggcgaccagcaccagccgctaaacgacgacggcgactaggattcaataagtcaggattttcccgttcttgtggcgtcattgattgaacgatggccttcatatgcgccatgtctttcggatccatcttgatgttcttgagttgtgggttattagccatccctggaatcatcttcatgatatcttccaaaggtcccatgctctgcaattgatccatctgatccaagaaatcgttaaaatcaaagctattttctttgatcttttcagccatatcagctgctttttgctcgtcataatcttgttgcgctttttcaatcaagctcaacatgtcacccatcccaaggattcggctactcatccggtctggatagaaaatgtcgagttgatcaagtttttcgccttgaccagtgaacttaattggtttgccagtgacggcgcgaattgaaagggctgccccaccacgtgtatcgccatctaacttggttaggacgaccccggtgacatctaaacgactgttaaagccttcagcaacatcgacagcggcttgcccagtcatggcatcgaccgttaagaggatttcatttggatgggctagctcattaatatcagccaattcttgcatcaaggcttcgtcaatttgtaaacgaccagccgtatcaattaagacgtaatcgttcttttgtaaggccgcttgtgctaacccttgacgaacgatttcaactgggttgacatccgtccccatttcaaagacttgtgcgtcaacttgcttgccgacggtcttcaattgttcaatcgcagctggccgataaacatcggcagcaatcatcaatggccgtgctttttcattttggattaaatattttgctaatttcccggccgtggttgttttcccggccccttgtaacccaaccatcataatgattgttggaatatgtggtgatttattcaacggcacagccgtttcacccatcatcttcgttaattcttcatcaacgatttttacaatttgttgtgcaggtgataagctatcaaggacttctgccccgatggcgcgttccttgacgactttaataaagtctttaaccactttaaagttaacgtcggcttctaataatgccagccgaatctcgcgcatcgcttgattgacgtctgtttcggtaatcttccctttacgccgaagcttactcaatgcgccttgtagtcgttctgttagcccttcaaatgccattttttatcagtcctttaagttaattattgttcggttaaattcagtaagtcagccaacaagcgcatcagttcttgatcgtctggatagtgcgcttgaatatacttttgtagcgtatctgcactggcattttgctgttcgtaattacgatagagatgcagcttttcttcgtaaccctctaagattttctcagtccgacgaatgttgtcatagaccgcttgccgactaaccttgtattcagcagcaatttcgccgagagaaaaatcatccccataatataatgagatataactatgttgttttgccgttaaaagtgcgccataaaattcgaacaacgaattcatgcgtgcgttttgtgcgagttccatttgacgcctcctagacttagtttgacctaactattagagtaccgattttaacgggcttagtcaacgttttattgcgcgatttaactagaagtttgtgcataaattatcttttcactggtataaacaaaaaatcatgctaaaatagaactgtaagcttttccataacttaaattggaatttctatggaggttgtatgatggcagcaacaattatctattggggcgttacattcgcattaatcggttgggggatttggaacttaatcttctcagtcgtctatttaaagaacaaggaaaatggtaatctttggttcttcgccattttaaacatcttaaccttattattcgggctattattctggtgggtcttcaacaatcacgcttggcaagaatactggttggttaaagcaaccgcaaccaacagtctactaggtggcgttttaatcgcctatgtcgtcttaattatcgcccaagtgattttgggacgcgaaccaaaagccaaaacagcttaatgctaaaaaagaggatcgacacgtttgtcggtcctcttttctaatgttgtttagcgattaatcgcgcgatattttcactgacttgcgttaaattaacttcagtagcttcaattgcttttgctaatgacattgcgccaggtgttgtgcagaaaatactgtcaattcctaattcataaagcacatcaatccccgctccaatatatccggcaatcgcaatcaccgtcgcctgtggattaacttgtttaaccgctttggcgactccaattggcgtcttaccatattgtgtctgaaaatcgattccgccctccccagtgacgacgatatccgcatctcggacaatctcggttaacccagtttgcgccacgaccatctcaacaccaggttgaacctgcgcatccgtaaacgccaataaaccagcccctaagccaccagcagcacccgcacctggtatttgcgcaacagattttcctaaatcacgttcaatcaccgcagcaaagtgcgttaaattccgatcaagttgcgcgaccattgctggggttgctcctttttgtggaccaaacacggctgatgcgccattcgggccgacaagcggatttgtgacatctgatgcaatcacaaccttaacccttgatagtgccggtatcatatgcgtcgtatctatccgtgctaaacgcgcaagcgccccaccgcccagtggtaacacctgtccgtcaacatctaacaaacgcaccccaagtgcttgtgccattccagcaccgccatcattggtcgcactgccgcccaaaccaatcacaattgtttgcacaccttgtgctagtgcggctgccattaactgaccggtgccataagtcgttgttatcaacggattttgcgtttgcgcatcaacatactgaatcccgctagcagctgccatctcgatcaccgccgttttgccatcacccaagatgccatattgtgctgataccgtttggtccaatggattttgcacttgtgcggttaagaaccggccattggtcgcatcgacaagcgcttggacagtcccttcgccgccatctgccattggcacttcgacataggacgcgcttggtaggcttttttcgaatcctttccgcattgcacgagccgcttcttttgcggtaacagcatttttaaatgaatctggtgctaacacaattttcatctgttaatctctctttcttctaaaaaaaggctagaacaaattatttgtcctagcctttttgctatttaatcgcttgactgacgtctgtatcagttgttttttgtggcccatcaccgacaataatatccttgaataagccataaacaaagcggtttggatcaaagagttgtaagtcgttcatttgttcacctagaccaaccatcttcactggtaagtgtaattctgtgcgaacggctaaaacaatcccacccttggccgaaccatctagcttggttaagacaatcccagtcacatcggttgtttgcttgaattgtttagcttggactaaagcattttgtccggttgttgcatctaagaccaacaatacttcttgcggtgcagctggtacttcacgcgtgatgatgcgtttcactttttccaattccttcatcaagttgacgttgttttgcaaacgaccggccgtatcaactaataaaatatcgaattgttcttctttagcgcgcttaaccgcgtcatagacaactgacgctggatcactccctgctgcactagcaaccacggggacattatcccggcgaccccattcttgtaattgttcgatggcgcccgctctaaaggtatcaccagccgctaataagaccttcttacccgctttttctaattggtgggcaaacttcccgattgaggttgttttccctgcaccattgacaccaacgaataagaagacagttaattcgccttgtggagcgaaatgcaattgattatcttctgcttggccttcttgaccgtacaaatcaactagcttttcaacaatcgcttgtgaaaccgcttctggtttcttaacgttacgcaacttcacttcgtcacgtaattcgtcagcaatcttcatcgctgtttcgtagccaacatcggcttcaattaacatttcttcaacatcatcgaaaaaggcttcatcaacacttctaaagttagcgaacaacgcatttaagcgttgcccaaatgtgagccgggatttttctaatccatcatcatacttcttcgtttcagcagcttgcatgtcgccagttactgcttctgtttccggcacttcttcaatcgcatcggattcttcagttactgccgacgcttcaactggttctggttctggttctggttctggttctggttctggttctggttctggttctggttctggttctggttctgagtttacgggtgccgccgttggtgtgtcaagcggtgataccgtttctgaatcatcttcagttgctaaactggctggttcatcggtttcagttttctcagctgccgcagtttctgcaggggtttgcgattcaaccggcgtagcgtctgattcaaccggtgtttccggtatcgcttggtcttgttcaaccggtgtttctttttctggttcggctgagaatgcttttttaatacgatcaaataatcccatggttttcctcctaggctgttgcgtgttcttctaatgaaacggaaacaatcttcgagattccagattccgccattgtcaccccgtataagcgattggcttgggtcatcgtcccttttctgtgggtaatcacgatgaattgtgtatcactctcataacgtttcatgaaacgaccgaaacgatcaacgttggcttcgtccaacgaagcttcgacttcgtccaaaatacaaaacggcactgggcgtacttttaagatggcaaacaataacgtaatcgccgtcaatgcgcgttcaccaccagataaaagactcaagcgttgtagtttcttaccaggtggttgcgcaataatgtcaatcccactcgttaatagtgcgcttggatccgtaaacgttaaactggcatggccgccaccaaacatgatcgggaagatggtttcaaaagcagcggcagtttgttcaaacgtttccttaaaccgcttttcaacttccgtatccatttcagccatcgatgctaataattggcgcttagcgtccatcaagtcggcatcttgttgcatcaagaaatcgtaacgttctttaacatgttgataatcatcaatggccgccaagttgaccgttcctaaatcagctaagccgagtttcaataatttcaacttagaccgcaattgatcgtcggttaagtctgatgcggccaaagcggccttggcggcttcgtaagtcaattggtaatcttcgctcaatgtatttaagcgttgatcaatgttaattttaacccggttgagcccgacagcattttgttcttgctcagctaaactatttttttgtaattggtagacgcgtgtggccttggcttgaagcgtttgttgttccgccttcagcgtttctttttgcgcgcgttcagtggctaacttcgcttggactttctcaatcaaagcattggttgcctttagcagtgctcgtcgttctttttgactcgaagcgtcttcttgatccgcttgttttagcgcagctagtttatcctgactggccttcaactgggctgccaggtcgttgctattgcgagtagcaaccgttaatttctcctgaacattcttttgttcagcttgagcgacagccaacttggtttcgagggctgtttgttgttgcgcaatttgtttttgactctcatcaaaatgttgtaattgctcattagctgtttcgagatctgcttgcagctgtgcaatcgacgcaacaatttcagcttcggctgccactaattctgcctggcgttttaaatctgcctcataagcttgttgttgttgttgcacttgataatcggttgcttgttgttgccgttcaaactgactcaaacgttcgtcagtcaaggctaacgtattttgggcagcttgatattgattcttagcggtttccaatgccgcttgtttcgtatttaattctgcttggcgtgccgttaattgagcttttgcggcttggacactggcttgcttttgatccaaagcgacctgcatcttggcaatttgaccttctaaatcagtcaaggtttgcttacgcgcaagtagcccaccattgttttgtcggttattatggcccccagtcatcgaaccacccgggcttaaaatatcccctgctaacgtaatgattcggtaacgatgccccgtcaattgactcaatttaatcgccggctccaactcagtcgcgacaatcaaattgcccatcaaatggttcatcaccgatcgcacttgttcatcaaactgcacaagctcactggcaattccgataaatccaggctgctgttgtaattggtgaactaagctacttggtagtaaacgtggtttgacaacgttattgggtaagaaagttgcccgcccaatccgattggttttcaaatactcaatcgcttgtttggccgtctgttcatcccgtgtcacaacttgttgtagctgtgcgcctaatgctaattcaatcgcttgttgatactcactgggcacttgcatcaattccgctacagcccctaataaaccagggaactgttgtttttgcttcaagacagccttaaccccttgataaaagccggcgtagtcatcatttaattccgcaagactagcttgttttgctttcgctttttgtaaaataccagacgcttggaaccaactattttgttgattttggtaagccgcttggtccgtgttaatttgcgtttgtaattcggccaactcattggacaacgtttcgtattgcgctttgagtgtttcaagttgggctttttgggccgcttgttctgcctttttttgtgccaattgcgtcgatgtctcatcgactgcactatcttgccgtgcaagttgcgttttagtttgtaacaagttcttttctaaatattgttgttcattatgattggtcgtttgggcttgcatctgatcgatgtattcttgacgaatttgttcaatcttcgctttcagttccgcttcactaccagacgcttggcgtttaagggtggttaactccgtcttcaacgcccttaatgccgtcaccttttcttcataacttgcctttaattcagattgattggcttgttccgccgttaattgctgttttaatgtgtcgatctgttcgactaaactttggcggttcgcatccgtataattagcgcgctcttttgaaacgttctcttggcctaatagattttcagccaagcgagacttttctaacaacgtctgattatcttgttctatttgttgttccaactgggctaaggttgcctgattctcggtttgggcagccgtcgtcttagcgatgtccgcttcaatctcttgcaacgcttgcgcaagggtttgcgccttttctttgtacgtcttttgatcagccactaattgatcaatttcaatcaccaataattgttggtgcaacgcatcatattgcgctttttgatccaagtaatcctgcgcaatactgctttgttccttcaacggttcaacttgtccccgtagttcatgaagaatgtcagtgacccgactcaaattttcatctgtttgatctaattcagattgagcctttttcttttgttgtttatatttcaaaacaccggccgcttcttcaataatattccgccgatcttctggtttactgttgaaaattgcttcaacccgaccttgcgaaataatcgaaaaagattctcgcccaaggccagaatccataaataaattaacgatgtcttttaaccgacaactcttttgattcaaataaaactcactatcgccatttctaaataaacgccgcgtaatcgtgacgttggcttgttcttgtttcaaatattgatcgctgttatcaaaagccagcgtcacttctgccttattcatctgtggtcgaatatcagtcccggcaaaaatgatgtcgggcatcttttcgccccgtaagctcttggctgattgttcgcccatcgcccaccgaattgcttctgtgacgttacttttaccgctcccgtttggtccaacgatgcccgttaaaccttctgaaaaattgatttctgttttatcagcaaatgatttaaaccctgataaaaccaatgactttaactgcatgcactaaactccctacacacggcggttggtttcaactgtcgtttgcttctttctttatttcagtttggaaagcgccactttagcagctgcttgttcggctgcttttttgttccggccaacacctgaacctaagacgcgatcgcccatcatcacatccacttcaaattgacgggcatgtgatggtcccacttctgccaataacttatattcaatctcaacttcaccatcttgttgcaagaactcttgcagattggtcttataatccgtttggtctgaaaattcaccggcttcaatcttgggaaagacaacttgttcgatgaatttaacaactgcgccacgcccttgatctaagaacaaagcgccgttaaaagcttcaaataaatcttccaaaagtgttgctcgtgcccgcgcaccgtttttttcttcccctttaccaaggcgaatgtatcgatcaaagtgcgcttctttggcaaaactactgaaactcttcgtgcagacgattgccgcccgtaagcgtgtcagtttaccttctggccagtccggatattttttatataagtattccgaaaccgtaatttccatcaccgcgtcacccaagaattcgagccgttcgttatcacgaagacccaactcccggtgttcattgacgtatgacgaatgtgtaaaggcttcgtccaatagtgctaaattctgaaattcaatgccgtagcgggctcgaagctcgctcactagtgctgcatccaaaattaaattaccccatttcaactgtttaatctttcactattataccgtttatacgcttaaaaaaacagcgtcgttcctagcaaaccgtttcttttattaatcactaaaaaacgcctgttttgaagtattcattgtaacacgcaaacgaatatttcaaaacaggcgttgctttatgcagatggcgttgtcattgctgctaaagcggtttgataactcgctagttcagcttcagttgcatagacatagtgttcatcggccacttcgcgcaattgacgaccttcattatctgcctcaattgaactatcataagcaattcgccgacgttgccgctcgacctttggatcaggtaacggcacagcagacaatagactttgcgtatatggatgcaatggtcgatcataaatgtcatcggctgatgccaattccataattttaccgttatgcatcaccgcaatccgatcactaatgtatttcaccatcgataaatcatgtgcgatgaataaatacgtcaagttttgctgttcttgaatttctttcatcaagttaaccacttgtgcttgaatcgatacgtcaagcgccgaaatcggttcatccgcaatgataaatttaggttttaccgcaagcgcgcgggcaatcccaatacgttggcgttgcccaccggagaattcatatggataacgcgttgcatggtctttattcaaaccaactaattccaaaagctcgttgacgcgtgcatcacattctgcatcatttttaaccaaatgatggatatgcaagccctcagcgatgatatctttgactttcatccgtggattcaatgatgcgtagggatcttggaaaatcatctgaatctctttccggaacgccttcatttcacgactatgatttttaatcttactaatgtcacggccatcgaatagaatttcaccatctgtcgggttgtatagccggatgatactccgcccagttgtactcttcccagaaccagattcacccaccaagccaaacgtttcgccttcatagatttcaaatgagacatcatcaatggctttgacttcggatttttttccttggctaaaatattgctttaaatgtttaaccgacactaatacttttttatccttgtccatcaattgtccctactttctcttgaacttgtgtcgcctggtacttagccatcattgcacggacggctgctggtggttccacagctggtgcatctggatgcaacaaccaagttgccgcaaaatgcgttttcgacacttggaaaaatggcggttcctgttccacatcaatttgtaaagcatatggattacgcggtgcgaaggcatccccttttggtggatccaacaagtctggtggggtccctggaatggcttcaagacggccagaagtatcaagtgttggcattgagttcaataagccccacgtatatggatgcttgggttgataaaaaatttcatcaaccaacccatattcgataatcttaccggcatacattaccgctacgcgatcggcaatccctgccacaacacctaaatcatgcgtaatgaaaataattgaggtttcaatcttgcgttgcaattccttcatcaaatcgataatttgtgcttgcactgtcacatcaagcgccgttgtcggttcgtcggcaatcaggatttgtggataatcaacaatcgcaatcgcaatcacgattcgttgccgttgcccaccagaaaattgatgcggataatctttcatccgtgctttggcattcggaatacccaccaactctaaaacactctgtgcacgtttcattgcttcttccttattcattgttttatgaatcaacaagggttcagcaacttgtttaccaatcggcatcgttggatccaatgacgtcatcggatcttggaaaatcatggaaatatcgctaccacgtaaggcattcatttcctgttctggtttttgtaagagatcttcattgtgatacttgattgtaccacccttaatttgagcattacccgctaacaagcccataatactacggaccgttaccgacttacctgaacctgattcaccaacaatcgctagtgtttcgccttttttcaagttgaaactgacatcgcgaatagcatggacgttccctgcgtaggttttaaaatcgatacttaaatgtttaacttctaaaatatttgccatttgacgacctccaatgatgaaaccgcgtggaaacggccttgtattgacatgctttttgaaactgactctgcttctaaacgtgctttcattaactgctttttatggttagctacgtctaacaaataatcaacaagttgattattcgccagactatgctaatccgcgaaagataaccgcctacttacacacgctatgattttggatcgaatgcgtctcttaatccgtctgctagtaagttgacggcaatcatgatcacacagaggactgctgctggataccacatttgatatggcaagaaacggaaagctttttgcccatctgataataacgtccctaatgaagcattcggcgctggaatcccaatcccgataaagctcaagaatgcttcgaagaaaatcgcactcggaattgtaaacatcgtttgaataataatcgttgaggataaattcggaatcagatgtttccaagcaattttggtggaactttcacccaacgtccgtgcggcgagcacgaattcttgttccttaagttggaacgtttgagcccgaatcaaccgggccattgtaatccaaccggtaaacccaatcgcgatgacgattgacaataaacctggacggagtaccaacatcatcaagacaaccacaattaagtttggaattgatgaaatgatttcagttacccgctgcatgaacatatccaaacggccaccacgccatccggaaacaatcccatatggaattccgattaataaatcgaccaatgtcgctagaatcccaattaataaggataagcgtgtcccgtataaaattcgtgataataaatcacgaccgagataatccgtccctaagataaacgttttgcctttgggaacgcccgcttgttgatatttatcaactttaacaccggaaacgtccatcttaccggtaaaaccagggatattccccgatccaattttagggggtaggttagcgtacgccacattttgtgtatttggactttgtggtgcaatcactggtgccaataaagcagccaacatcacaatcaagaggacaactaatgaaaccaccgcgactttattttgctttaagcgccgaatggcatcttgcgtaaacgtcaatgatggtgcactaattttttcttgtgcttcatgcgtgtcttgtgtaaggggcttgaatgagcccgctggtattttaatatccgccatttagtgcgccccctgactgtcacttaatcgaattcgtggatcaataatcccgtaaagaatatcgacgactagaataatcactgttaataagaatgaatagaaaatggtcaagcccatgattgttggataatcattcgtcataattgacttcacaaattgttccccaatcccgggaatcgagaaaatattttcaacaactagtgacccagtcatcaagttgactgccatcggcccgataatcgtaacaaccggaatcattgaatttcgtaaggcatgctttgccactgtttgccattttgaattgcctttggctttagcaagttcgatgtaatcactgtttaaaacatcgaccatttcagtccgcatgaaccgagccgtattcgccaatggtgcaaccgctagtgctaatgttggtaagacactagatgaccagccgtcccataacgcaattgggaatagttgtaatttaaaggcaaggaaaaattggagtaagaccgccaacacaaagttcggaattgaaatcccaacgattgaaaagaacgttgcaacgccatcgacccatgtgttcttgcgaatggccgccactgcccctagtaaaatgcccagtaatgagccgacaatcatcgcttgtgccccgatttgtaatgaaggtcctaaacgcgtcatgattaagctcaagacgggctgattgttgaactggaaggatgtgccaaaatcaccatgcaacaaaccacctagatagatgaaatattgctggatcaatggtttgttcaaaccgtactgttcattcatgatccgtaattgatcagcactcattttttcctgattcgtatatggcgtccctggcatcaacttcatcatgaagaaggtcacagaagcgacaatgaatagggttagcactaaatagaatattcgtttaataaggtatttactcataagttcgctcctaacaaaaacgggcttcattgtttttcaacgccgaaacccatctttataaagtcagtttatttttctaaataaagtgagacattattgtagtttcctgaagggccgtagtctaaacctttaaggcttgggttagttaagtacgccacacctgattgatacagtggaatgacacctgactctgtattcataatatcttgtgctttaacaaggttttgccatcttgctttaggatcattggcgttgtcacctttacttgccttgatctgtgcatcgtattcggcattgctccaatggccatcattgttatcgccgcctgttacaaacaagtctaagaatgtgattggatctgggaaatcagcgttccaagcactaaccaccatgtcgaaatcaccgttcgttgaacgtgttaaacgagtcttaaatggcacgttcgctaatgtgactttcaaacctggtaagttcttttgtaaagtattttgcaaatattcggattgtttcttggcagtatccgtatcatcgccaagtaatgtgtaattgaatgttttgcctgtttgcccagtttcagcaaggccttcgttccaaagttttgttgcttctttagggttgtaacttgcatttttcttacccgctgcgtctaaatcatcaacaaaatccttcttagttgttgggtcaaatgacatattctttggtgtcacagaagcaattggacttgaaccatcacctagaacctgtgcgactaattctttacgattaattgtcattgaaattgctcggcgaatcttcgcatttttaaagattgggttcttttcttggttgacttgcatgtagaatgttgctgatttttgtaaagttgagtaatgtggatcgtttttcatttgtttagctgtgtcaccactgatcgccgtccgatctaatttattactttggaagaggtttaaagctgttgatggatctttaaccacttgatacttcaacgtcttaaccttaactgctttcgtattccagtaattggtgtttttaacttctttccatgagctatctgggccattccaattttctaacttataagggccgttgaaaactaatgttttagaatttgtcccgtaactcttgccagctttcttgaccgcttctggatattgggggaagaaagttgagctggtcatcaattgactgaagtatggaattggtttttcaagggtgacttctaaggtgtgtttatccttagcgactacacccaatgaatcaaccggttccttaccagtcgtgatgtctgctgcatttttaatgccttcatagatataagcatattgtgagccgacctttggatcaacgactctgcgccaagcataaacgaaatcttctgccgtgaccggttgaccattgctccacttcgcgtcttttcttaatgggaatgtatatgttaaaccgttattagttggtttgaccactttagtcgcaatcgccggtttgatttctttaccctcgtagcggtaaagaccttccatcgtatcggttaaagcctgcgcaccgatcacatccgtatttaacgctgaatccattgtcgcaatgacatccccagttgcaaaactggctgtgtcagtcttaacggcttccttgctacctgagttaccacaagctgctaataataatgtgaccgccactgttgttatacctaataccaaactcttttctcgtttcatatggacactcccttcagttattaaaaataataatacatgattaaaaatgaaaagtaaataataaagattaaaatattctaatttattttcattgatgcagagccattataagaatcattctaatattataacgcatccgcaaatgattattatgtgaataatctcattttcacaaactgtttaaaatgcaaaaaaataagcctgtcggtcgcgaatactcacaaccaacaggctcgttttcaaggttattatttgatttttgttttaatgtaagcaacggcatcagctaccgtaccgatcttttcagcttcttcatccggaatttcggcaccaaaagtgtcttctaattccaaaacaaattccacaatatcaattgaatcagcatccaagtcttccttgaagttcaattcgtctgttacctgatccttatttaactcaaatcgatcgccaataatagccgcaatcttatcaaagatttcttgttcattcataattaaaaacctccaaattgaaacccttacctacgtacttaacactttgggtatccagtgattatacataacttcgcaactcaattcaagtaaatcaaatcagacttgcgaagtatattgtagcgcctttggaacacattgtccacctattttaatcggtttcttttgggctattttgttggtcaaaataatcgattactttttgaatcgtttggttcgccagcattgcatgaatctggcgaacagtgtagtaaaccgtgcggccatctgcagcaccgtgcgccttaacaacaggggcttttaagcctaataaaacagccccgccataaacagatgtgtcgaatttatcacgaatcccaccaacactctttttcaagagtaaaccaccaattttttctttgacaccagcatccataatcgcatgtttgacttgcgacatcacgattgtggcagtcccttcaattgctttaagcgtcgcattgccggtaaacccatctgtgaccacgacatccgcaaccccttttaagagttcacttgcttcaacgttaccaatgaagtttaacgttagatcatctgccagtagttgatgtgctgccttatgcaactcatcacccttgccagcttcagtcccattattcaacaaaccaattcgcggcttttgaatgccacggacgtcttgtgcgtagaagttccccattaagccatattgatgcaaatgctccggctttgattcggcgttggccccaacatctaacatattgaagcctaaatctgaattaatggctggtagggtaggcattaaacctggacgatcaatccctttaatccgaccaatcacgaataatccggctgctaagagcgcaccagtattccctagtgaaaagagtgcgtctgcttccccatctttaactgcctgcgccgccagaaccattgaagcttgctttttacgccgaatcgcacgcactggttcatcttcgctggtgattttttcggtggtatgcacaatcgttaaccgcgtcatatcatcaatcaacggtttaatttgtgcttcatcaccatacaacgtaaattcaacatctgttaattctgagcgggcttgtaacaccccttcaattactgattggggtgcaaaatcgccgcccattgcgtctactgcaattttcatcatcattcctctttccgttttcaatctaacgttaggtaattttgcttttgttgttgtaagtatgttttgagtggcgtatggtccggtgctgccaactcaggatcaagcgtgaagattttttgcacttcttgttgggcgacttgtaaactcgcaaagtcggctactggatcgccaactttaaagacgggcaatccagattgacgatcaccaaagacttcccctggcccgcgcaattctaaatccttctgcgcaacgacgaatccatcagtggtttcagtcataatcgtcatccgatcaacaccttgttggttcttcggatcagccaccagaatacagtatgcctttttcttacctcggccaacccggccccgtaattgatgtaattgcgccaacccgaaccgatccgcatcaaaaatgagcatcaccgtcgcgtttggcacatcgacaccaacttcaacgacggttgttgaaaccagtaattgaattttgttctcagaaaaagcgttcataatctgatttttttcatcatcttttaactggccatgcaacaatgcaacatggtaatcaggttcaaattgttccaccaacgttgcgtaaatctcctcggcattctttaaatccatctgttcagattcggcaatcaacggtgtaatcgcaaagacttgcgaatcgtttgcaagttgtttacggacaaagctgagggcttgttcgacttgattactacgcacccaactggtttcaattggaatccgtccttttggcaattcatcaatcgttgaaacgtccatctcgccatacgcggtaatcgccagcgtccgcggaatcggggtcgccgtcattgcaagaatatcaggctgtaaccccttttcacgcaaaattcgccgttggttgaccccgaaacgatgttgttcatcaattacagcaaagcctaacttatgatagaccactgcatcttgaatcaaggcatgggtgccaataataatattgatgcgcccggattcaatgtctgccaacaacgtccgccgttctttagccgtcgtcgaaccggtcaataagccaacagtcacgttcattggtgccaataagcgttgcaagctttgatagtgttgttccgccagaatttccgttggcaccatcaatgcggcttgataacccgcagtcactgccgcgaacagcgcaatcgccgccacaatcgttttcccagaaccaacatccccttggagaaggcgattcatatgcgctggtgattttaaatcaagacaaatttcattcaccactcgcttttgtgcatcggttaaatcaaacggtaaggtttgaataaaatctttaagtgcttcattttggtactgcaaagctaaaccgtttgccacatgccgatcagtctgtttaatggcttgtaattgaatctgatataggaagaactcatgaaaaatagcgcttcggcgtgcttgctttgcttcaggatacgttttagggaaatgcatgccagcaattaagtcgcgttcgttcattaacttatagcgcgtgcgaatatcctctgggatcaattcgggaataacgtcttgatacaaatcaaaggcttcttgaatcatcttgaccagtgtcccttgacgcacacttttattaacggaatagatggccgcaaacgatggattctcagccgattgaaccgctaggaccttcatccccgtcaatgtatgacgtttagcatcccacttgccataaatagcgacatcgaccccggcttcaaacttgtccttaagatagggttgattaaaaaaagtaaccatcacaacgtcatgttcaatcaagagccgtacattcagccgggtcttccctggtccccaacgactgatgaccggatcagcgacgaccgttccttttaacgtcaccttttcctgatctgccgcttcggataaatccttgaccttcaaatcttcgtaacgaaacggaaaataatacaataaatcactaatggtccttatgccaagctgatcgagggctgtcagacgtttcgggccgacgccagctaacacagcaacagaatccgttaaacttaacattgacagcctcctgtaacgtgctttcaaaagcatcctgttgcgtttagcaccattagccaaacaagtagctacgctagtcattcggctaattaaactaatcctcacaggataagcacttttgatacacttctttttcttaacgtgctttttaaccatattccaaggttaaacgtacttctactaaaaaacgggaaccaggtatattcaacctcattcccgttttatttgattaactattcaactgaaatcaagtatgggtaaactggttgattcccttcgtgtacttcaacttctaattctgggtcttgggccataattgcatcactgatttgttcagcttctgttgcatcgccgtcttccccgataataattgtgacgatttcactgtcttcatcaagcattgtttggaccatttcaatggctgctgttaaacgttcagccgttgagaccttaatcttaccatcgataatccccatgtaatcgtctttcttaatttcaagtccatctaaagtcgtgtcccggattgattgcgttacttgaccactaatcacggtatctaacgcctctgtcatggcttcttgattagcagccaattcagcagatggatcaaatgataagagagcggtcatcccttgagcaatcgtccgactttgcacgattgcaactggaatatcagccacttcggcagcttgttcagcagctaagaagatgttcttattatttggtaataagatcacttgtttagcattggctgctttaatcgcatctaaaatatcttgcgtacttggattcatggtttgaccaccacttaagatataagtagcccctaaactcttgaagagttcagcaatcccatcaccggccgcaatcgcgataatcccattttcaacaggttctgcttgcacaggggcagcagcttgttggtcgttttcaacaatcgtatcatgttgtaaacgcatgttatcgactttaatcttcactaatgaaccaaagtgttggccgtaagccatgactgtccctggatgttctgtatgcacatggaccttcaccacttcttcatcggctaccactaagagagagtcaccaacaccgtttaaatgattgcggaattcatcataatcaaattcgcgatcgacagttgtcccatcaccaagggcgaccatgatttcagtacaataaccattttcaatatcttctgtacccatttgagcggtttgatgatgattggcattgaccatttcatccatttccgcttcatcaggtgtgtaaagatcttttgcaggtgcttggcctgttaaaccttctaagaaaccttcatagatgaagaccaatccttgaccaccagaatcaacaacgccgacttcttttaagacagggagtaattcaggggtcttcaacaaggccttcttagaaccctcaacaacagcttcgataactgcaccgatatcatcagtttgaccggcaaccttggcaccagctttggcgccttctctggcaaccgtcaaaatcgtgccttcaacgggtttcattactgctttataagccgtttgaacaccatttgtgaatgcgtcagccaaatcttgtgcatccaatgtttctttttcagccatgctcttagaaaaaccacggaaaatttgtgaactgataaccccggagttaccccgagcgcccatcaaaagccccttggctaaactcttagataattcaccgacagattgcgcgttgttttcattaactgctttggccccactttgaaacgttaaactcatattggtcccagtatccccatcaggcactggaaagacgtttaatgaattgacaaattctgcatttttagtaagccgatgtgcagcaacccgcatcattgcttggaattctgctgctgtgatttcagtaactttcacgaatgttcctccttgaacaaaaacaaatagaactggacctagtggccagctccgctaattagttttagtcttctaatacccgtacaccttgaacataaatattcactgagttcgcactgacacccaacattgtttcaagattgtacttcactttactctggacgttacggcaaacttcagagatcttaatgccgtaaccaacaataatatagacatcaatcgcaacgccattgtcttcttgacggactacgacaccccgattataattctcacgattcaaaatatcgtttaaattgtcacggatttgattcttacttgccatcccaacaattccgtagatatctgttgcagcaccaccaacgacggttgcaatcacgttattggtaatatcaatatcgccatattgtgttttaattttaacagccattaaaatagcctccttgtgccatacttattgttattttagcatagcggagaagagttgcaaagcaactggtgatgaattcttccccaaatgcggcttatttttggactttaatgagtttaaacgacttattttggactgtcaagtaaatttccttgaaagagctcttgcattccccaaactattatggtaaattatttaagtgaattgtataagccggtgtgcatgcatgcaactattaagactaactgaatcatattatgtttctcgttaattctaccggctttacttaaaggaggaataagaccatggcaaaagacgttattaccggccgtaaaacatcatttggcaacaagcgttcacacgctttgaacgcatctcgtcgttcttggaagccaaatttacaaaaagtacgtatcttagttgatggcaaacctaaacgtgtttgggtttcagcccgtgctttgaaatcaggcaaagtaactcgtgtataatttcaattgatagatcgccagttggcggtctatttttttggcaaaaagtgcgagataagtcggctaatcctcaggcgatgactgatcgaacacgtttatggcaaccaaaaagacggctcggataaaataattttatccgagccgtctttttaatccttactttgaatcaccgcaaccaccccagtttcaaaactaaattggccggtctcaccgatgaactcattactagcccatgaaatcgggacttgtgtttggtaatccaccaagcgatatttttcatcaattaaatttaaaccagttgtgggaactaatggcacaaaggccagataccgtttatcggcttctttttgtaattgatacgtccctggtgcataaaagcgaatcgtattttgccgatcgcgcatctctaagcggtctaaaaacggcttaaaacggctttctaagggcataaagagattagcaagaaagtggtccaaccgaccgcctgttgcgccataaagcacaacttgatccgcattaaattcagttagcgcaattgataatgccaactgagtgtcggtatcatctttttctgcttgcacagagcgaatatcctttactgctgattgaacggtggtccgctcagccgccgtcaatgaatcaaaatcgccgactgacacgacaggtgttacgcctttttgcaataagcgccacgtaccacggtctgctgtcacccattgaccatcaatcatttctggctgcgccaattcgggggcccactcactgactggtcctcccaccaacacattaatccgcgtcatgagcagcctgctttaaagttgcaatccgggttgctaaatcaccggcaaacgtatatgaaccggcaacgaaaacatctgcgcctgctttggcacacgcaccgacggtttggtcgttaaccccaccatcgacttcaatcgtataatctgcatcagcatgttgatcgcgataagtcgctaattcagtgaccttatccaacatcgctggaataaacttctgcccaccaaaaccgggattaaccgtcattactaagacttgatcaaccaatgataagactggttcaatcgcactgactggtgtccctggattgatcaccacacctgctttaacaccagcatctttaatcatctgaagaccacggtagagatgttgcgttgcttcggtatgaatcatgattaagtctgaaccagctgctgcaaattgttcgatgtagcgttctggttgttcgaccattaaatggacatctaagcctaacgttgtcaatggccgcaagccagttactacttgggggccaaacgacatgttggggacaaacatcccatccatgatatccacatgtaatagatcagcgcccgccttttcaaggttttggacgtctctttgtaagttcataaagtctgcgcttaaaattgaaggtgcgatttgtttcatcatcaaaactccgatcacatttttattttgacttcttgtaaactggccgaatatcctttaattctgctctaaactgtaaataattcgtataacgactttgcataatttcgccactgtcgacagcttctttcacggcacatttcggttccatcacgtgttgacacgttctaaacttgcatccttgcccgatttctctgaactctgggaatcggtcaaccaaggtttcaatcgtgacgtttaataaaccaagtgatgaaaagccaggcgtatcaccaactaacccatcattcaacggaatcagttcaatatgccgggttgtatgtttcccacgatttaaactctgcgaaatttcggcagttgcaatattcaagctcgggtcaatgtggtttaacaacgttgacttaccggcccccgtttgtcctgtaaagacggttgttttatgcgggaacgtgtcttcaattgccgtaattatctccggtgtaaaggcggtccgcggtgcaaaaatttgatagccgatcttcgcgtaatacgccaagtaatcactaatttcttggtattgttgatcactaatcatatcggtcttagttaaataaactaacccttgcatgtgcagcgattcaatataaatcaagaagcgatccaacaaattcaaggagaatgctggttccaccgccgaaacaattacgacagcattatcaatattagcgactggtggtcgaatcatctcatttttacggtctaaaatctcaagaatatagccactttctgtttcactttcactctcgaattcgacaaaatcgccgacaagtggcgtaattttccgtttacggaaattaccacgcgcacgcgttcgataaattttgccttcactttgtacatcataaaacccactgagggcgcgaataatctgtcctgtctgcaataggtcacctcccaattagtttgtcacatggtcatcagatagaatctcttgaccatttcttaaaatccggaaacggccggcttggtccgctttaatcgtaaatggcaattcaacggttgtatccgcggtaatcgtcatttctttataaacactcattattgaatgcgtgctatcttctaaataaatcgtaatcttattcgtcgtagccgttgaagtactacttgaactagagctcgtactactactgtcacccgatttgctcgagctgcttgtactactttgtgaagttgctaaggaattatcaaacggaatcgtaatcgacttcgtaaaactcttggtagcgggcgcttttttacctttagaaagtaccacgttaatattggcaccttcttgaatagatgcaccactaccaggtgattggctaatgactaacccttcatcaatcgtattggagtaatcctctgaaaaagtaaccgtcaaaccaacgtcatcaacatagtcttgaacagcctgtttcgtgtaattactcaaattgcgtaaagtaatgcttggcttgccgctgctgacagtcaaggtaatcgtcgtcttacttgggacaactttttcacctgcggcaatgctttggtctaaaaccagtcccgaagcaacactgcgtgaactctgatatttgcgcacaaccgtcaatcccttttgtttcaataacgtgctgacatctgtgaacggtttgtccgtataatcttcgatctcatactttttacgacccgtactgattgttagatcaaccgtactgcccgatttaacatgcattcctttaccaggtgtcgataaaatcacatgccctttgctgtacttattgctagtagttttttgaatcttaccaacttttaatttatctgcggttaatgctgcagtcgcgttttcttgcgtcatatctgtcacatctggaacagtcacttcactgccttgcattgcgtacgcagcgaagacaccaagcatcactaacaagactacgccaagccccacaaaccaccatttccgcttcgacttcttatgcggctgtttctttttctgatcgtcttttacttcagtctcatctttgggtttggcttctggcgcatcgttttggcgcgtaatcccttctgggtcgagagccggaatcacctttgtttcacccatatcaccttgtgagggcacgaatttcggttcatgcgcccgactagctgataatgaggtactcaaatcagtggtcatttgcccaacatcactgtagcgttcgtccggatctttggcagttgcttttaacacaacgttttccaaagcttgtggaatccgcggatcataatctcgaacgggtggtacagcatcttgaaaatgtttaatcgcgatggaaaccgccgattcaccttcaaatggcaccatacccgttaacatttcatacagaataattccgagtgaatagatgtctgaacgtttcgttgccattgaaccccgtgcttgctctggtgataaataatgcactgatccgagtaatgtattggtctgggtcatcgcggtttcactgagcgcaatcgcaatcccaaaatcgctaatcttaacgttacctgcttcatcgaccaagatattctgtggtttcaaatcacgatgaataatatcgtgcgcgtgggcattttcgaccgctgataaaatctgcgtcataatatcgacgacgcgttgataaggaatcgggaagtgttcaacgatatacttctttaaatctgttcccttcacatattccatcacgatgtattgcatgctgttttcttcaccaacatcatagatactgacgatattggggtggttcaattcagttgtggcaagtgcttcgcgtttaaagcgacgtaccgtgttcggatcgttccgtaaatcaagtcgcagcaccttgaccgccacttggcgatccaaaatcagatcttgggccagataaacgttggccatgccaccttctccaattggacggataatctgatagcggccattgaccgcgtagcctgtctccatcatcgcgcaccctcctcaccagtttgatgtaagattaacgccgtaatattatctaagccaccggcatcatttgcttgttgaattaatgccgcacatttttcttccagcgatgtcggtgtcatcagcgtggtcttaatttgttcatcatcgaccatattggttagcccatctgtacataataatagataatcatctggttcaaattcgtaaattgttacatcggcatcgacatcttgcgaaacgcctaatgtgcgcgtaatgatgtttttttgcggatgatgctttgccgcttcttcggttaactccccttgtttcaccaattcatttaccaaggaatggtcctctgttaattggcggagttcgttattccggaagcgatacactcggctgtcgccaatattggcaactaagtaattggcacctgaaatcaacactgcgacgagcgtggtgcccatcccaaacaaatcatcatactgattagccttcgctaaaatatgtttgttttctttttgtaattcgaaaattaaccatttaaccatggattcaatgtcggtatcatcagttcgttcgaactcgtacccaatatgggaaaccgccatttctgaagcaacatcgccgcctaaatgaccgcccatcccatcagcaacaatcgcaaactgcgcaccgcttttattggtataaaagccgacatagtcctgattattttggcgttgttggccgacatcggtttgaaaagcaactttcataagaattcacctcaattaataatttaagcccgtcgtgttaaacaagcgatgaaaaagccgtctgtttgataatcatcgggatagatttggacaaacggtgtcgcttgattggctggcaatggtttgtcgagtgctactggtacgatttcaaattctggatgattggccacaaaagccgcaacaacttgttgattttcttctgggacaatcgtacaggtactgtaagtcaattgaccacccacttttaaggttggtgcaacggcttctaaaatcgccaattgaatcttttgaaggttcaataagtctgctgcttggcgaccatacttgatttccggtttacgtcgcattaagcctaagccagaacatggtgcatcgactaaaatcttatcaaatgtttcaggttcaaattgttcaccgactttgcgtgcatcgagcgcccgcgcatcaatgacgtctgcaacatgcaaacgcttagcgttttgctcaatcaagcggactttatgttcatgaatgtctaaggcagtaatttgccccccttgactggcatccaaataagtcgccatatgtgtcgttttcccacctggggctgcacaagcatccaagatccgatcacttggttgtagttgcaaacttggtgccactaacatcgagctttcatcttgaattatatacgcgccttgttcgaacaattcaccgctggctaagtgaccgccgtgggcaactaatccagcggctacaattacactcggttcaatcgttaacccgtcagcctgtaagtctgccaaaacggcatcaactgaattaacacgggtattgactcgaatggacgcattcgctggttggttaatcgttgccaataagtgttccaattttgattgccctaattcttggtggaacttcgccactaaccactgcggcatactgtaagtcacacttaggcgttcgattggatcggcaattgctgctaaatcaggcaatccagtccgttgttggttccgtagaattgcggtgaccaacttagccgtgccagcatggcccatttgtttggcaatctcagttgcttcataaaaaatcgcatgttcaggaacacgatccaaataaacctgttgaaaaactgccgtccgtaagacttggcggacccaagttgccagtttagctggtttttgaataaagggggctaggtaataatcgagtgtcatttcatgttgaatcacaccatacacgagctgcgttaaaaaaccagcatcttggggattcaagtggttttgtttaatcacttggtcgagggccaagtttgaataactgttttgtttggcaaccgccgttaaaatttcaacagctaaatagcgtggtgtctttttaggcatcttgcaccaccacttgttgtccgactgcgagttgtttgccaaccccgtttaagaaagattggaccggcattttagccttaccagctggttgaatctcggtaatcttcaaaacactgccattgccggctgctaattcgaaatcctttttgttgatagcgacaatcacaccggctggttgatccgtcgttgtttcagcaacagttgcttgccataattttgtccgttgaccattaattggcaaccaagcgcctggttgtggccgtaacgcacgaatctggttgaccagttgcgttgctggttgctcgatatctaattgttcttgttccttagtaatattgtaagcaaacgttacttgtgcttcatcttgtggtgtccggggcgcggtttgatcgataatgcttggtaatgtcttcaataatagatctcgaccgacataacttaacttatcaaataaagtcccggtgtcgtctgaagcttcaattggaatgctggcttgttcaatcatatcaccggcatccatttttttagccatatgcatgatggtaatcccaatttctgaatcgccgtttaacacagcatattgaatgggtgcaccaccacgatattttggcaagagtgaaccatgcacattgatggctgcaatcttagcggcttctaataacttcgttggcaagaattgaccatatgctgccgtcacaattaaatctggttgcaaggccatcacgtccgctaattcttgactaccactgagtttttcaggttgaaaaacagtcaggtttaagcgaacagccgcttctttaacgggtgtttgttgtaagacttgcttgcggccaactttccggtctggttgggtcacaacggctaggacttgataatcgtgtgccacaagggcttctaaaatcggtactgaaaattggggagtccccataaatacgatggatgtcattaatcaatcacgctcactttaagtaaattgtaggggttcattgtccaacccaatcttgaaaccatgacgggtatcaatttgggtcgtttcgagaatctcggcgagtttcgcctgaagttgtggttcctgtttatatttaatcacaatttgatagaaataacgattattaatccgcgcaatcgacttcggcgtcggacccagcacaatcgcttggtcggataagacgggccgtaattgacgggcaatgtggaaactcttcttggctgccaacgcttcttcaggatggctaatcgttaactgtaccgtaaaataatacggcggatagccgccccgatggcggactgccatctcatattgatagaagccttcataatcatgttgcttggcaaattggatggcgtaattttccggattaaaagattgcacgattaccgcaccggttttatcggcacgaccagcacggccactgacttgcgtcaataattggaacgtgcgctcacttgcccgaaaatcaggtaacccaagggcggtatcggcgttaatcacgccgactaacgttacatcagggaaatcaagccctttggcaatcatctgcgtgcccaataaaatatcggcatcgtggtcgccaaagcgtttgagtaatttagcgtgcgcaccttttttgcgggttgtatcaacgtccatgcgcagaatacgggcatttggaatcagctcttggagttctgcttcaactttttgtgttcccgttccgaaatagcgaatctggcgactctgacaatttggacaagtccgcggaattgcttcttcatgaccacagtaatggcacttcatcgagtgcgtatccatatgcaacgtgagtgagatatcacagttgggacactgcaagacaaagccacaatcgcgacacatgataaaggatgaaaaaccgcgccgatttaataagaggacgctctgttcgcccttttgcaatcgatcctttaacgcatctaatagcgcaggtgaaaaattgctgctggcttgttgcttcatcgcctcgcgcatatcaaccaactcaactgccggtaatggctgttgattaatccgttgcgtcaggcgcaagagttggtagacgcctttttgggcacgggcacgcgattcaagcgatggtgttgcactcccgagaatcactgggcaatgatggtactgactccgccagatggcaacatcgcgggcatgatagcgcggactttcatcttgtttataggaagcttcatgttcttcatccatgataatcacaccaatattctccaatggtgcaaaaacggctgagcgcgccccaacgacaacgctagcttctttgcgttcaattcgccgccattcatcatacttttcaccttcggataagccactatgtaaaacggcaacttgatcaccaaagcgacccttcacgcgtttgaccatctgcggggtcaaagcaatttcagggactaacattaatgcagttttcccctgttgcaagaccgcatcaatcgtttgtaaatagacttcggtcttaccgctgcccgtaatcccttcgactagaaaaacccgatcagattgggccttagtagccgctacaacggcttctaccgcatcagcctgttcatcagtcaacgccattttttgcgtcgttgtgacggttttaggataaggatttcggtaagcttcaactttaacttggcgtaaccaacctttgtcggcgcctgtcttgatattctcccgggtaaaagtcgtcttggccaaaacatcctttaataagggattgggctgatcaattaaactttgtaaataactaatgagttgactctgcttttgcgctgacttacgtaagccggcccgcgcttcttctaactgttcaaacgataatgccggttcaatcgccgttaattgcttcacgcgggcgcgatcatcgacatggtagaccacttcgattttcccttggcgttgtaactgcattaattgttttaacttttcgggatctagcgactggtcaaacgttaattcgtcgttaccattgaacaggcttgcttgtaaggctggatcaatttcatcaactagttgcgcggtcttagaatacttagcacgcatcacacttgggagcatcgtttgcaagcacgtaatctgaaaggcataggtccgctctgccaaccaacttgataattgaagtaattctgaattcacagccggttgtaaatcaatgaccgccgtaatcggctttaattgcccctcaaaattggcttgatcttgaatggacaagataaagccttgaattaatcgatcacctttgccaaaaggaaccgccacacgcatcccaggttgaatactgtctaataaagtatccgatacttggtaatcgtatggccgattagtttgcatcgtcggcacatcgacaatcacttttgcgatttgtggcatctgaatcctcctttttagttaagctaacaactcagcaactcgttctagaatttgagtcgcaatcacccttttatccgccaacgctaatgtttccggtactgcattcggttgtaaaagcgtaaccgcattttgatcaacaccaaagccccgatcatgctgactgacatcgttcgccacgagtaaatcaacatttttagctgctagtttggtttgggcatgttgtagtaaatcatctgtttctgccgcaaaaccgaccaagaattgatgcgtcttctgttgcccaagcgtcgccaaaatatctggggtgcggtctaaagttaactgcatctcagttgtgttcggttgttttttgattttgtgcgtgacatattgggccggtttaaaatcggcaaccgccgcagccatcaccacaacatcggccccttcaaagacactgctaactgtgccttgtaattgcgccgccgtttcaacgtaaattattttgtgcaaaccagccggcactggcaattctggacgcgtactgatgaggatcacattcgcccccatcgccacggctgcttgggccactgcataccccattttaccagaagatcggttgccaatgtagcgtaccggatcaattggttcttgtgtcccaccggcagtcaccaccacgttctgcccacttaaccgttgcggtccgaattgttgcgcaacttctgccataatcgcggtttcttcagggaaccgcccgacaccagcatagccttccgctaaaaagccggtatccggttccatgacagtatagccatctgctttaagttgggttaaattccgttgggtagctggattaaaccacatatgttcattcatcgccggcacaattaatttgggcgcggtagtggctaacaaggcggtcgagacaaagtcgtcagcaatcccattagcgagtttcccgattagattagcagtcgccggagcaatcaccgccagattagtccaatccgctaagtgaatatgggcaacccgatccggttggtcttgattaaacaaatcagttaacacgggtttacgcgttaatgtggcaaacgtcagtggcgtgacaaattcggttgccgcctgagtcattgccacttggacctcagcacctgctttaatcaatccacgcaccaaattagccactttgtagacggcaatgccacctgtcacataaactgcaattcgtttattcgttaaatccactttcaaaaccccctaaaactaaaaaaactgcactttaatttaaacatccatcgatgaataaactaaacatgcaggttctttaattattcttattcgctgtctttttgagcgagcttatccattttttcagcatctttttcaagcatcaatgaatcaggatcaataatgacattgccagcagcaatttcttccattgccatcccaaccgttttaggtgatttgtattcagataacatcttaatatcaccggcttcgatttcatgggcccgcttgctagctaaaacagccaatgagtaacgtgagttcacgttttctagtaacttatcaattgaaggatatacaatcatattattattcccctatcattttcttgtattggtcgatcacacgtggcactcgtaagtgttcactttcgataatcttttcgattcgttgaaccgcatttggaatttcgtcgttgacgacagcataatcgtaattttccatcatcttgatttcgtcggctgctttttgcatccgcttatcaatcgttgcttgatcgtctgtgccgcgtttttgaattcgattccgcaattctaataaatcgggtggtgtcaagaagatgaagacgccatcgggacacttctcgcgcacttgcattgcgccttggacttcgatttctaataaaacatcgcgccctgagtctagtgtctgattcacatacttcatcggtgtaccataataattatccacgtactgtgcatactctagcataccatcatttgcaatttcttgctcgaattcttctttgctcacaaaataatagtcaacaccatcttgttcgcctggtcttggccttctcgtcgtcatcgaaactgaatagtgaaaatcacgaaattcatcttctagcattgcttgacggacagttcctttaccgacccctgatgggcctgataaaacgatcaacattcctcgattggacatctacgtaattccctcttcttttataaaatagttaaagtctattctgcactatttggcgggaaatttcaagtctactttgtttccatctcatttaaaattaaccttaaggacgcaatttcgtcgtttgacagcgtcacacccttacccattttggcatgatccggtgcccaatctcgcaaatcaaattttggtgcacgttgattccaagagattaaattcaattctttacgccaaccagctggattttcactcaacacaccgatttctgccataatttcatattcaattttgcccatcaaatcaccctttctatcagttcatcctattatacacgaaaaaaatcaaaaaatgccgcttgcaattctgaacgtttgttcgtataataaaaacacaaacaagtgttcggaggatgaaatcatggaatttaaacaagcaacggttagcggactcagtcaacaattggttaaacaatatcaccgcttttttgaacttacaccagaagcgactgcttttgttgaacaaccccaaatgcaacctgctcagattcaattatttatgacccaagcgtttgaacgccactaccatgttgcggtgcaattcaatgttaacgatcatctcgaacaagtgaccgggcgcttggttaaacaactcagtgcgaacaagtatctgctaaaagagagtcgttcgaacctctacaagattgtcctttgcaatcaaattcgttacattcaaaagaaaaattaagcaaaaaaataagggtgcagccaaaaaaatattttggctgcacccttattttaatgtcggcgactttgcttagccgtttccgctaatgccaccaattcttcggcatgttctaaagttaactctgttacttcagtccccgctaacatccgtgccagttcagcaatccgttgtttaccggttactttttgaacggacgtttctgttcgattttgtttcacttgtttttgaatttgatattgatgatcactcattgctgcgacttgcggcaaatgcgtaatgcagagcacttgcgaatgttggccaatttcactaatcttattggcaatcgcttgggccacacgcccactcactccggtatcaacttcatcaaagatgatgctagtaacgccttgtgattcggagaaaatcgttttaagggctaacatcaagcgcgataattccccaccagaagcaattttagcgagcggccgtagtttttcaccagggttgggttgaatgtaaaattcaactttgtccatcccggaagccatgaactgttcctgttcatttggcaagaattcaactttaaagaccgtcttttccatgtataacgcttttaactgttgatgaaccgctttttcaagttgcttagctgctttttggcgtaattgcgtcaacgtttgtccgtttgtcctaagttgttgttcaagttgcgtgaattgctgctccaactcacttgcgttcgcttcagttgcttgcatcgctgctagttcagccccgattttttcaccataagcgagaatttcggcaattgaatcaccatacttatgttccaaattattaatagtttctagccgttgttcgatttcatctaaccgtgcttcatcccattctaagtttgaaacttcccgactaatatcaatgctactatcttgcaacgtgtaataaccagtctgcagactgtccgcaatacgcttgaattctggatcgagttcagcaatttcttgcatctgattcattgcaactgcgatttggtctaacgcattcccgtcttctcctgctaaaatcgtgtgactggcttgcaatgcttggttaattttttgaaagttcattagtttggctcgttcttcgactaacttgctttcttcatcagcctgtaattgggctgcatcaatttcgttagtttgaaatttcagcatatccaagcgttgcgcccattcttgttcattttgctgtttttgcttcaaggcacgctgtgttttacgataggcagcataagtttcggcataggctgccttcgcggttgttaacttttgatgcgcaaattcatccaacaaccccaagtggcgatctggatacattaattcttggtgttcattttgaccgtgaatatcaactaaggtttctccaatatgcttcaaagtggttgtattgaccaaatgaccgttgacccgacaaacattgtgtccattaacggctaaatcgcgctgtaacaagacggtttgttcgtcgtgttcaatgccaaactggtctaatactgcggcggttgtgccattaggcgtcatcgtaaataagccttcaagggtcgcttttttagcaccagtccggataaagtcttgtgaaccccggccgccagcgagtaacccgactgcatcgataataattgacttaccggctccggtttcccccgagagcaccgtcatcccttcttcaaaactaattgctaactgatcgataattgcaaaatcgtgaatgaccaactcttgtaacatctgatcatccccctttcgtttctcttgatgctaaaaaaacttgccaaattactttagcaagtcttcaataaacttcgtagactgtttagcattttcttctgatttacaaatcaccaacacggtgtcgtcgccgccaattgtaccaaatacaccactgagctgcatttgatccaaaagattagcaattgccgtcccgttacccggtaaggctttaatcacgacaaaatagtcttgttggttatgcgtaatataggcgtcacgtaaaatccgacgcaacttttctttaacgtctaatttcttttcaggcggtaggctatagtgatagccctcgtccgcatttggcactttaatgagctgcatttctttaatatcccgcgaaatcgtggcttgcgtaacatcgatgtcttccgcttgtaacagcttcacaaaatcctcttgtcgttcaatctcatgggtctggattaaattttttaacagtcgttgccgatctaccttgcgcattaaaacaccctcttcatgtgagaaattattctattcctcaatgatagcgcatttatacataaaatacaaagttttatacactattttcccgttggtcgtttcaaagcagcataggcattctctaaaaccgtatcaatattcacgttttgggccatcgttccagtctcagccgtcgtattccgtagatgaatcaagaattcaatattgccttcaccacctttaattggtgaaaaatctaaccctagcacgtcgtagcccgtcgctaaactaaaatcaacgatgtctttaaccaccatcttatgcactttcggatcacgcacaatcccgtgtttaccgacattttcagggccggcttcgaattgcggcttaattaaagcaaccgcttcgcagtccggtttcaagatgggtttcaacggcaccaaaatcttatgtaacgaaataaacgaaacatccgtcatggcaaaatctggttgaccattggtgaaatcttctggttgactgtaacgaaaattaacccgttccatcactacgacgcgtggatcttcgcgcaatttccatgctagttggttatagcccacatctagtgcgtaacagagtttggccccatttctaagcgccacatcagtaaagccccctgttgaagaaccgatatcaagtgcgattttatcctgtaaatcgatgttgaaaacctcgaccgctttcgccaattttaaagcccctcggccaacatacggaatcttacgccctttgacacttaagacagtttcagcgtcgattttttcgcccggtttgtcgattcgttcatcatttttaccgtacacttcaccagccatcacagaccgttttgcttgttctctggaaccaaataatccctgttggactaataatacgtctacctgttcttttttcatctgttctcctattcattaaaatagtttaaaaaactatttaatagtgctttatctaacccggataaatccgttaaagcagtttgcgcggcctgataagtctcatccaacgcgtcttttgcaccggctaagcccaataagcctgggaaagtattcttatgttcgtcagcatccttatggaccgccttgcccatcgcttctgtagtgcttgtcacgtctaaaatatcatcttggatctgaaatgccaacccataattttgcgcaaaaagctgtaaactagccatttgttcatcggataaatcagccaaaatcgcacctaagccgaccgcgcattcaatcaaacggcccgttttgagctgatggacttgtttcaattgagctaacgataaagttttagtttgtccttcgatatcttcaatctgaccagcaaccatgccacttggaccggctgcttgcgccaataatcgaacagtacggctctgctgatcagtcgtcaaatcggtcgtcgttaaccattcaaatgcaagtgtcaataacccgtcgccggctagaatagcttgcgcctcgccaaaaaccttatggttcgtaggttgaccgcgccgtaagtcatcattatccatcgccggtaaatcatcatgaatcaatgagtagctatgaattaattccaatgcccccgctacgcgatacgccgtttgattaatcggtcgccccacacttgcaagcaccgcaaataccaaaagtggccggagacgtttcccgccagccatcactgaataggtcatcgctttttgcaaggttggttcttcaatctgggcaagttgctcagtcaaataggtttcaaatgcgggcacttgttggcgcgcgaacgttttgaaatcaaccattattcttgtgcctcagcatccaatgggacttcttcgccattatctgccatcactttggccatcgttttttcagccttacttaaggtttcttctaatgtttgacttaatttaacacccttttgaaaagcagtcatcgctttttcaagtggcacatcgcccgtttccagttcattcacaattgcttccaattgtgctaagttctcttcaaatgttaatttcttttctgccatcttattcgtctcctttatgagtggccgtaacacgcgcgttcacgaggccatcttggacatgtaactcgattgattggtcgatcgtaaaatcggtcgtttttttcattacattttgattatcatccgttacataagcaaatccgcgtcccaaaattttcaacggacttacgagatccaaggctgccaccgcttgtccagcctgttgccgccgattttggacaaggctctcgattgctcgtttcaaacgatgatcggtatcagtcaacattctttgtgcttgttgaatcgcaccacttggtgattgcgactgcaggcgttgctgcaagagttgtacattctgttgactagtctgtaagcgttgttgttgcgccaacaataaacgacggtgcaactgatcgacattttgtaaatagccgtcatacaagcgttgcggctgttttaagacgtaactgttctgtaagtggaccaattgctttttgtttaatgccaatgttttcgaaaatgcctgatataaccgcaaacgttgttgttgcaacttcaacacttcgtccgtcaaaaccggtgttgctaattcagctgctgctgttggtgtcgctgcccgaacatccgccactaaatcagcaatagtcgtgtccgtttcatgaccaactgatgaaatcaccggaatctgactggcaacaatcgcgcgcgcaacgcgttcttcattaaacggccataaatcttcaatcgaaccaccaccacgaccaatgataattgtatcgaaatccccttgttgattaacttgattcagtcgatcgactaaaatatcagccgcaccgtcaccttgaaccaccgctgggaataagacgagttgggcaattggataccgacgttgcgtcgttgttataatatcgcgaataacagccccagaaggactcgtaatcaccgcaatccgttttggaaagcgcggcaatagttgctttggtgcatcaaacaagccttcagccgataatttagcttttagctgttcataggcttgatacaatgcaccaagaccatctggctccatccgttccacatagatctgatagtttccagttgcttcgtacaaggaaatccggcccacaacaagcactttcatcccctcttcaggagtgaacttaatcttttcaaaagcggacttgaacataatggcactgatcttagctttattatcttttaaactaaaatattgatgcgcattcggtcgtaagcggaagtttgaaatttcgccggttaaataaacccgatccaaatacggatcgcgttcaaatttagcctttaaatactgcgttaatgcggtgactgttaaatagtctgttggtttaaccacgtttagcacgttcctttgcaatctcaatcgtttgatccatgagcatcgtaatcgtcattggccccacgccacgcggaactggcgtcatcgcactaacatgtgatttaagggcttcaaaatcgacatcaccggtgactgttccatcttcaagccgattaatgccgacatcgacaacaaccgccccttctttgacatcctcaatgccgaagaagtgtggtttaccgatggccgccactaagatgtcggctgttttcgttagggcttttaagtctgccgttctgctgtgcgcaatcgtgaccgtggcattggcattgagcattaaagctgccaatggccgaccaacgatgttactccggccaacaatcacgacatttttgccagccacgtcaatatcgtgagctgccaataagcgcataatcccgtttggtgtacaggccactaagcccggttgattaagccataatcgcccaatattgactgggctaaaaccatcaacgtctttttgtgggtcaatcgcccggataatatggtcttcattaatttgttttggtaatggtaattggactaaaatgccatcaacggtttcatccgtatttagttggcgaacaaccgctaataaatcagcttccgttgtttcagcagacaggcgttttaactcagatgccatgccaattttagtcgctcttctttgcttgctttgcgtataaatcgcacttgctggatcatcacccaccatgacgaccactaatttcggggttaccccttgttgtttgagtgttgccaccgtcatttgttgtgcttgtgttaattcatttgcaagtgctcgaccatctagtaattccaaagttaacaacccctatttatcgatatttgatgtttctattttagcatagttaatcggttaattccgggttatcagctgataatgaccgtttaaattcaaaaaaacacgctaaaaaaatactttttaacgtgttttaagtggtttcgttcgtattttactaattaagcttcaacgaatttagataaaacgccgttgataaagccttttgcttgatcatctgtaaattgtttagcaagttcgagcgcttcattcaacgccactttatcgggtgcttctgttgaattttgcatttcaaacaaccctaaacgcaagataattaaatccggtttggctaaccgtgatagttgccagcccttcttcaagtatggcgttaaagcggcgtctaattctgcttgatgttctgtgacgcccgttaccaagaaggcaaggtagtctggaacagcaacttcttcaacttcttcagcatcgaattgatccatggttaaaacggcttggtaagcatctgccaattctaatgtgtcattagcatttaacgcaaacaacacttgaaatgcagcttggcgaatttggtgtcggttaaaattaggcattaagattggtctccattttgatcaggtgtttcatcgttaaataagtcatctggatcaataatttttggtgctttttcagtgacaacgcccaccacgtgtacgttgacttctgctagttctaaatcagtcatgaacaataattgttctttaatggcttcttgcatcgcaagggcaaccttcggcacagaaacaccatagttcagataaacataaacatccgcattcactttgccatcaatcaccttaagagttacccctttaccgtgattcgaacgaccaaacaattcgttaatggatgatgataacgtcccccgcatttggtggaccccatcaatcttgcttgctgcaatccctaaaatcacttccacaacttcaggtgccatttgaatcttgcccaatgcattttcttgtgtatcaagtacaatatttgtttcttctgccatcgaaacccctcctaacaagttcttgctaatttagcctatgcccgtgagatgtaactcccatcagatgtgttaatcgttaacaaatcaccttcgttaacgaaaaatggtacttggaccactaagccagtttcaagtgttgctggtttagtaccacccgaagatgtatcaccacgaacaccaggttctgttgcagccactgctaaatcaaccgtgtttggtaattcaacccctaaggtttcactaccatacatcatgatagaaacttgcatattttctttcaagtatttcaattcatcattgatttgtgctgctggtaattctaattgttcgtaagtttcagtatccatgaagacgtggttgtcaccatctgcataaagatattgcattgattttgtatcaatgattgctttttcaactttttcagttgaacggaatgtcttttcttgattggcacccgttcttaaattcttaagttttgagcggacaaaagcgccacccttacctggtttaacatgttggaattcaacaatccgccataggttgttgtcaaattcaatggtcaagccatttttaaaatcatttactgataacattgtttatcctccgagcattatataagtatgccattgtcctaatcatagcaagaaatcaggctcaaaagcaagtatttctagccttttatccctaaaagtagctataaaaaaagggaccggcacccgccaatcccttttagcgtattcaatcgagcaaaagtcgatctgaacactcacttttagattgtcaatggtttgttgcctgagtaattagtataccagtaaaactggatttacacaaacagagtgtgacatcagtctgggttaaccggagagatatgactgatggaacacgtttagaatgtgacgacagccccgcttctctcgcacaaaaaaacacccacacaaagtgggtgtttaaaaaattatttagcttctgcagcgtatacagaaacctttttcttgtttttaccgaggcgttcgaaacgaacgacaccttcgataagagcaaataatgtgtcatcgccaccgcgaccaacattttcacctggatgaatctttgtaccgcgttgacggtaaagaattgaaccagctgttacagtttggccatcagcacgtttagaacctaaacgacgacctgcagagttacggccgttagttgttgaaccgccacccttatggtgagagaagaattgtaaattcatttgtaacatctaaatgcacctcctgtttattaactgtctatttacgttttgtttgtacttgaatgtactgcccgtattgttgcgtaatatcttcaagcgtcaactgcaaattctgcaagagaatctgagctgtcgctaaagcttggcccgaaaccgttgccggaatctgacaagttaacaaaccaccattcaggttatctgcttctacctctggttcaaaaccagcaagcttttgcaaactgttgattgtcccgattgagacagcagaaacagctgcacagacgatatcactcccgtaaggacccgagtcggcatgacccgtaatttgaaaagaaataattttcgaatcggcattgaccgtaaagtcagcttgaatcatcttatttccctcaattaggcgttgatagcgtcgatcatcactttagtatatggttgacgatgacccttcttttgatgactgtgtttcttaggtttgtatttgaaagtaacaactttcttttcgcgcccttgtttttcaacagtaccatcaacagtaacaccatcaatgtttggtgtaccaaccttagttgtttcaccaccaactaaaataacttgatcaaaagttactttttcgccagcttctgcggctaacttttcaacgtagattgcttgaccagcttctaccttatattgtttgccacctgttttgataattgcgtacatgtgtgcacctcctattttttcttagactcgccaactaaggtgactaatcatagtacttaatgccttagtatgcgcggttgcagctgtggagctcacaattacaacgttcatattatatcgaatatcacagggcgagtcaatgctttattacgcctcgacaaaaaattgtgcgacatcgaacgtcgtattaggtgtttgtaccaattggtataacatcttagccatgtagcgtggtgaatacacaagcccgtcattgacccacttaaagaccaacgctaaactggcccccgctaaataatcaatcgtaatactcatctcaatttgatcagcctgtgaagtctgattatagcgcttagccacgtaatcctgcattaattggcgcattgattcagtcagttgtgcctgaaagtgaagcgtcgcctcatttttatagaacactttaaaagcagcttgttgttgttcaacatattcaaaaagtgcctgtaaactgacctgacgatatgtctgatcgaccactacagtcacttgctgataaaaatcggccaccaaatcggccaccgcggttcggatgaaatccactttatcttcataatggagataaaaggtcccgcgagtaattgccgcttgcttggtgattgcttgaatcgaaatcccctttggcgtactgtctttcagcaagataatgagggcttgacgtaattgttgctttgttcgttgaacacgtggatcttgcgctcgtaaatctgtctcacgaaccatctgatagttcccccaatcttttaattaaattcacctgtcgatagtatagccgctcagtgaaaagtctgtccattaatcggcttgataacggcccttgatcagttgaatatcccttagtgtacactgtaaatttgaagattctgttaacgaacacccaaaaagtaaactttatccccccacaaatttaattgttgttcgtctgcggttatagtaaaatgagcgtagtatttcaaatcggatagcgttaggtggtcgtcactttgatttctgcattcttcattattttcatttcaatcgttttattcgccgtcattgctagtcaattgactttcaaaatcggcttaatcacaaattgcgtgctctttatcattttagttggtgttgatgcttatctattcagctggggtagtggttctcactgggtgtacgttattgtcagcctactcggattagtcgctagcgaattattattagctgaactcccccatcttaaataattaggttaacgtcaaaaagcggtccaactcatcattgagttgaaccgcttttttagtgcccctgccaaggactctcagtataccatattaatcaagtaaggttgtttctttcacttcatcaattgtcttggtaccagccaactgcatggtaatcgataattcatggtttaagtgttcaaaaacagattgtaccccttgggcgccacctaaatttaaaccataaataattggccgaccaatggccactaaatcagccccacttgcgagtgctttaaagacatgttcaccacggcgaataccactatcaaaaacgattgggacgcgttttgcgacttgttgcgcaattaaaggcaacacttcaaatgaagcaggcccgccatctaattgacgcccaccgtgatttgaaacccagatgccatctgcaccagcttgaatggcaatttcagcatccactggtgattgaatgcctttaacaaagactggcaaatttgtgatttgtttaatcttttgaatatcttctggtactaatccttgtttagcggcagcataaatttcagagatgcccttcccagcaccgtcagaattactataagctgctaaattaggcattggtagtgggaattggaattgcgtctcgatgtccgcttcacgataaccacccaacgttgaatcgacggtgagaataatggcttttacacctgccttaacggcttttttcaataagaactcattgaattgatcatctttactcatatagagttggaaaaattggggggcatcaggagccgctgcggctgcatcttccaccaatgtattggcataggtactaattgagaaaatcgaaccagccgctgcgacccctttagcagtgtcgacttcccctttttcatgtgctaacccttgggctgctgagggggcttgaataatcggcgtttttaaatcaatatcccataatttagtatgtaaatcagcatgatcgatgccttttaacacacggggcattatttttttagtattgaaagcactggtattagcagccatcgtccattcgtcttcagcaccgccacggatatagccaaacgcgccagcttccattcgttctttcacgcgtccttctaacgacgctaagtttaaaatatcgattggattttccgcttcacttgtatgatatcccatgatagattccttctttcaataattgaatacctttatcatggttctcttatcaaaagtaagcaaacatttatactcggttatttcacttgcgttcgaaatccaatgtcttgccggtaaaaagtcgtcggtaaagcgagttgcgctaaatcccgatagacctgttgactagctcggcctagcgtctcagcagaataactagcggtatacaaacgcccgccagcgctgaccaattgattggcttgttctgcgacactagcgaaactaaatgtgctgttgcgttttgcaaattgttgcaaagtgggtaaaacaaacggcgttgtcgattgtgtcgggtaaccatctgaagccaccacaacacctaacgtaatgcctgataattgccactgtaacgttggggtttcccccttcaataattgtgcaaaaacttgggcccagtcgcccgtcatccgtggtagcaccacttgtgtttcaggatcaccaaagcgcacattaaactcaatcactttcaccccgtgttgtgtggcaattaagcccgcatacaagacaccggtaaaaggcgtttgacgttcagccatcgttgccacaattggttctaaaatagtcgttaccgcttctgcaacgcattggtcactaatctggggtactggacaataagcacccatcccacctgtattaggcccacgatccccgtcaaaggcgcgcttatgatcttgagcaaccggtaatggatagacgcgattattcgccaccaacgccatcagcgagaactcttcaccttcgagataatcttctatcaataactggggcacgccctgttcaaagaacgcctgaacagtttgccgcgcgctcacgtcattttgagcgatgacgacgcccttgccagccgctaaaccatccgctttaatcacaacgggataacgaacgtcatcgagggcatccagtgccgcttggacagtctgataggcttgataagccgccgttggcacatgcgcggccgccataatttctttggcgaaagttttagacccttccaatgccgcagctgctttacgcggtccaaagatcgctaatccagcgtcttgaaaagcatccactacgccagccactaacggttgttcaggcccaacaatcgtataggcgacctttttggcctgcgcaaaggcaatcatcgctgcaaagtcagtcatctcaatcgtaactgtttgaatcccatccaattgcatccccggattgcccggcaaacaatagaccgttgcaacagttgaactctgctgtagcgcacgcgcaatcgtgtgttcacgcgcgccgctaccgattactaatagatccatgatttgcctcctattggctagtgtttgaaatgacggcgaccagtcgtcaccatactgattcctttttggttggccatgtcgattgaatcttgatccttaatcgaaccaccaggttgaataacagctgtcacaccatgttctgcggcgtattcaacgctgtcatccattgggaaaaaggcgtcagatgctaagacgaacggtgcttttaatccattggcttccgcttgttcgattgcaatcttcacagagcccacccgattcatttgccccgcaccaatgccgagggtttggtcctttgttgcgaccacgatggcattactcttaacgtgtttaaccacacgttgggcaaataacatcgcagcttgttcatcagccgttggtgttttgtccgtcacaaccttcaattcagatgcttgatcagtcacccgatcacgttcttgcacgagtaagccgcctaaaacagaaaccatttcgaagcgatccgcttgcttagcagcctcaaaatcaagcgtcatgacgcgtaaattcttcttcttttctaaaatggctaacgcttctggggtgtagcttggtgcgatgataatttctaagaataaactgtgtaattcttcggctgtttgaacatccacttcacgattcaaggcaatgatccccccgaaaatcgatactggatcggccgcgtaggctttttgccaagcttcatagatggttgcacccaagccgacgccacacggattcatatgtttcatcgcaaccacacaaggttcgctgaattctgcgaccactttaaccgccgcatccgcatctttaatgttgttatacgataattctttcccgtgtaattgtaccgctgaggcaatcgagaaagccgttggtaaactgctttgatagaacgctgctttttgatgggcattttccccatagcgcaacgcttgtttaaagtcgtatgaacgtgttaatttttcagggaattcgatgccgactgcttcggttaaataaccggcaattaagctatcataagctgccgtgtggcggaatgccttggctgctaaataacgacggtaatcaactgcagcttgcccctcatcgacgacgtgttcgaggacttgcgcgtaatcttgttgatcaacgaccacgtacactgatttgaagtttttagcggcagaacgcaacattgaaggtccgccaatatcaatttgttctacagcttgcgcttcagtaatccctggtttttgaattgtttctttaaaaggatacagattgacacaaactaaatcgattgtctggatgtcatgggctgctaaagcggccatgtgtgttggttcgtcgcgtttggcaagcaagccaccatgaatattgggatgaagtgttttaacccgtccatccaacatttctgggaaatgagtgacttcatcaatcgcaattactggtacttgcgcttcttgtaataccttgaatgtcccgcctgttgagatcacctcgtaaccagctgctattaatcctttagcaaattcaataattcctgttttatctgaaacactgaccaacgctcttttcattgattgaattactccttctattttggtttttaattaattcagcaacaacttgcggataaatcgcgtgctctgtgtcgtgcacgcgttgttccaatgcggctaaactatcgccaggcaacaatggtacttttgcttggacaatcatcggaccgctatcgacaccttcatcgatgtagtgaatcgtaacgcccgtttcagccacttgtgccgcataggcccgttcaatacttcgtaacccagaaaaggccggtagtaacgacggatgaatattgataatccgttgtgggtaggtatgcaacaatactggggtaatcacccgcatataacccgctagcaatatataatccaactgtaacggtgccaacagcgcgacaattgctgcttcatagtgttgtcgatcatcataatcacttaagcggatgaccgtcaccggtacatttcgttggcgcgctttttcaatcaccggtgcgcccggctggtcacacactaaattcataatctccatgcccgctttttttaaggcgtcatcatctgcaagtacttcaaagttagaacccgttccagaagcaaaaatcgccactttcatctcatcaacccaccaattctattgcattttcttgtcgcggtttaaccgacccaattcggtaagcctgttcttgttcagcgttcaattgggcgaggacttgtgccgctttttctggtgcgacggctaagaccatcccgatccccatgttaaaaatgttatacatctcgagtgcatccaattgcccatattgtttaagtgccgcaaaaatcggtaagcttggccatgttcccaattgaatttcggccatcacgttgtcaggcaacatccgcggtatattttcaataaagcctccaccagtaatgtgggccgcgcccttaataaagccttgttcgataaacggctgacatgcttgtgtataaatccgcgttggtgttaatagccattcaccgagtgtctgaccaggcaattcgggtaagtgactgtcgacggacaacccatgttgttcgaagaaaatttggcgcacaagtgagtagccattcgaatgaatcccactggacgcgattccgattaatacatcccctgtttgaatcgtttcaccagtaattaattgagcttgatcagcaattccgactgcaaaacccgctaaatcataatgtttttcagcatacatacccggcatctcggccgtttcaccaccgattaacagcatgtcagcagcttggcagcctgcaacaacgccgctgacaatttgttcgatcttatccggctgcgtttgaccagccgctaagtaatctaagaaataaagtggcttagcgccttgggcaacaatgtcattgacacacatcgcgacacaatcaatcccgatggtcgcgtgtgcatcagctgcaaaagcaaccatcaacttggtcccgaccccatcggtacttgaaacgagcaccggattttcatactgccccatcgctaaggcaaactgaccaccgaagcgaccaatattttgattggttgcgccgacctgcttttgaatccgacgaactacttcgtaaccggctgtcacatccaccccggctttttgataagcgtttgtcatgattattactccttatctgcttttaaacttgcctggtaggcagcttcataatcgtaaagtggcgttggataatcaccgttgaaatacgccatacataacccggaatacggcgcatcttgttgtaacccaatcgcgtcgatgagcccttgttcgcttaaaaagccaagcgaatccgccccaatcgtagcgcacatctcgtcaatgctttgatgcgcggcaatcaattcatcgcgcgtttgaatatcaatcccataaaagcaagggtacttcagtggcggcgatgcaatccgcaaatgcaccgatagtgcgcccgcttctttcaagcgtttcacgatatgcttactggtcgtcccgcgcacaatcgagtcatctaccaacacaatccgcttgccggcaaccacgcttttaacgaccgctaacttacggttaaccccttgttcgcgcagtgcttgcgtcggttcgataaaggtccgacccacgtattgatttttaacgaggcccatttcatacggcaaaccactttcctcggcatagccactagcggccgataacgatgaattcggcacgccaatcaccatatccgcctcaactgcggtttcgcgtgctaactgtttccccattcgtttgcgggccgcatggacgttaatcccacagatatcagaatccgggcgagcaaagtagatatattccattgaacagattgaatgcgtggtttcggttgtgaagaagtcagaatgtaacccgtccgcatcaatcgtcacaatttcgcctggctgcacatctcggataaaagttgcttgaacggtattgagcgcacaagtttcactggccacaacgtagcccccgtttgctaaacgtccaatcgagagtggtcgaaagccgttgggatcaagcatcgcaatcaatgaatcttgcgttaataataggtaggcaaagcccccacgaatttgttgaagggccgtcttaatttgcgcgtgcaaatcaggcccttctgcacgccgaatcagatgcatcagaatttcagaatcagagctcgattttaagatggcccccgattgttcaagcatgcggcgcagtgtgaccgcgttggttaaattaccattgtgtgcaagtgcgaattgatcggttgcaaaatcgaataggaacggctgaatattttctaaaccgtgactaccagcggtcgcataacggacatgaccgattgccgcgtccccggttagttgggttaagtgctccggtttgcggaaaacatccgccaacaaaccacgattgcgataacccattaagtgcccgtgatcattagtgacaatgccggcaccttcttgcccacgatgttgcaaactatgcaagccaaaataagtcatttggtttgcttctggactaccccaaatcccaaaaacaccacattcttcatttaaactttttatttcatttgacatggtatcgccgtctcccaacttaacttcgcttcagtcaccgataactcaacagttgattcagtcgtttgcacttgcataattggcgtggccgagaccgtcccaattaattgcgcctgatcttgacagaacgcttcaaacgccgtctgattttctggccgaaccgtgatgataaagcgggattgcgtttcaacaaataactgttgttgattaagggggacttgcacgcggcagccgagttgttctttaaaagtcatttcggctaacgcaaccgcaaaaccaccctctgataaatcatgtgcgctagtcacccagcccttttgaatcgctgctaagacgcaatcttgactcgctttttcagtggctaacgaaaagccgcttaatcgtcctgcaactttgcccgtcaacatcttttggagttccgaacccgctaaattcgtatccgtctggccaacgaggtagattaaatcccccgctgacttaaaatcttgcgtcgtgatgtcggctgtatctcgaatcaaaccgaccatcccaatcatcggtgttggataaatcgcttcgccattgaattcgttataaaaagaaacattaccagagatgaccggcgtatcgaaaacctcgcaggccgccgcaatcccttgggcactttgatcaaattcccagaatacctctggcttttccggattgccatagttcaaacaatccgtaattcccagtggttggccccctgccgcaacgatattccgtgctgcttcggcaactgccacttgcccaccgacttttggatcgaggtataagtaacgcccgttacaatccgtcgtcatcgcgagcgcttttttagtcccacgaattcggacgaccgccgcatcgcttcctggtaaaacgacggtattggtcttcacttgtgcatcatagtggctgtatagcgagcgtttgtcagcaatcgtggattggcccaataaatcgagccatgttcgtttaacatcattaatcaccgactgataaggcgccatcgctttaaattcagcgatgcgtgctagttcagtttgtgctttatgataaatcggcgcatcactcgttaaagccgccactggcaaatcggccactaattgcccaccatgccacaattgatattgttgactctcagtcacttcaccaatccggaccgcatccagatcatatcgttcaaacaaggcaaccacatctgtttcatgaccagctttaacacaaagcgccatccgttcttgcgattcagaaagcatgatttcataagcggacatctctgtttctcgttgtggcacaagatcaagattgagaatcatcccagtacctgccttttcagccatttccgctgttgaagaaactaagcccgccgcacccatatcctggatgccgactagccaatctggatgcttcaaaattaattccaaacaagcatccattaatagtttttccataaacggatcacccacttggactgctgagcgttgggtcgccttgccatctgcaaattcatccgatgcaaaagtggccccgtgaatcccatcgcggccggttttagccccgacgtagaacacactattgccagcaccacgcgctttaccttgctgaatatccttttggtcgatgacaccaacgcacatcgcgttgacgagtggattagtctgataacatggatcaaatccgatttcaccaccgaccgttggaatcccgatacaattaccgtacccgccgattccagccacaacttcttgaacaaggtatttcgtgtggtcatccgtcaattcaccaaagcgcagactgttcaaaagcgcaatcggcgtcgcgcccatcgaaaaaatatcccgaataataccgccgacaccggtggccgccccttcatagggttcgactgctgagggatggttatggctttcagctttaaagaccactgcttgaccatcgccaatatccaaaatcccagcgccttcacctgggccttgcaacacgtgctgaccacttgttggaaattttttcaaaaccggcttcgaatttttatatgagcaatgttcactccacatcactgaaaataacccggtctccgtataattcggcaaccgttttagaattttagtacgaatcaattcatattcatcatctgataacccccattgctgataaagcttggtggcttggatttctgccggtgttggttgctttaacacggttattgccctccttttcgaatcgatgtgattaatgctgcaaataaacgttgcccatcatcgctacctaataaggtttcgactgcgcgttctgggtggggcatcatccctaagacattgccggcttcattcgtaacgcccgcaatattcgctaaactaccattcacatcattttgataagtaaatgcaatttggtggttcacttttaaccgttccagggtctctgcatcgcaataataattcccttcaccatgagcaatcggcaaccgaatttgttcgttcggcatatagtgttgggtgaacatcgtaccggcattggtcacgttcaacgcgactgtgtcacagataaaatgggtttgtcgattcggcaaaagaacgcctggtaataacccgagttccgttaaaatttggaacccgttgcaaataccgataaccggtttgccagcagccgcaaacgccttaactgccgtcataatcggtgccaacttggcaatcgcaccactgcgtaaataatcgccgtatgaaaagcccccgggcactaatacggcatcaaaacctgccaagctagttgctgtgtacgggacatactcagcgttttcatgacaaacatcttcaattgcatgatataaatcagcgtcacaattggaacctgggaaaactaatacggcaaatttcattgattcgtcgccaccttttgtatgtcgtagtggtattgttccatattaggattggctaagagttgatcacagatttgtgcgacctttttttcaactgcggcttggtcatcgccagccacttgcatttcaaaggacttgccaatgcgcatgccgctcacaccatcaaagccaagtcgttcgatagctttttggacagcctggccttgtggatctagcaccgaatctttataagtcacttgcacacgcacattaaacatctgtagaaccccctaaaattttttctaatcgtcgtaatacgacatcgtacaccgatactaaatcccctttgttcaagcggaaaacatccttatctagcgattcatgcgtcgtttgatcccacagacggcagttatctggggaaaattcatccgccaaaatcaagcgaccgtcataccggccaaattccaacttaaagtcgattaaatcgatatccgcacggtcgaataaatcgattagcagctggttgatctgcttagtttgtttttcaatcacttcaatttccgccggtgtcacaattccaagcgcggtggcttgcgaaatattgatggctggatcatctagtgcatcatttttgtaatagtattcgataatcggcgtggccaatcgtttgcccggtgcttgaccaaacttgcgggcaaaactccctgccaccacgttgcgcaatactacttctaggggcacaatcgtcactttcttgacgagctgttcagttgctgaaatattctcgattaaatgcgtttcaataccatttgccatcaagtatttgaaaattaatttcgaaatctgataattcaataatccttttcccgtaatctgttccttgcgtttgccatttaacgccgttgcttggtccttatagaccattctcaacacattttgatcgtcagttgtaaaaacatctttcgcttttccagaataaaacaacgtctcactcatgcttgaatccctccaaataacatacattttatttaaaattaaaataatcgttcgtgttacattagggtgtaaaaaaactttgaaataacctcatttcaaagttttcatcattattcgcccaaaccaacgcggtcaaagatttctgcgacgcggcgaatatggtaatggtaatcaaacgcgtcgtctaaatcagcgggcgtcaacacattcataatccggtcatccgcttctaacaacggtctgaaatcagtttgttgatcccaagcttgggccgttttaggttgaatcaagtcataagccgcttctctcgaaagcccatgatcgattaacttcaaaagaacccgttggctgtaaatcaacccgaaagtccgccccatattacgcttcatattttctgggaagactgtcaagtccgtcataattttggtgaaccgtcgaagcatataatccaacaaaatcgtagtatccggtaagatgatgcgttcggcagaactatgcgaaatatcacgttcatgccagagtgcaacgtcttcatacgccgttaccatgtgtccgcgaatcacgcgtgccaagcccgtaatattttcagaaccaatcggattccgtttatggggcattgctgatgagcctttttggcctttcgcgaaaaattcttcgacctcgcgggtttcagatttttggagaccccgaatttcagtcgcaaacttctcgattgaagttgctagtaacgccatttcagccacgtaggcagcatgcaagtcccgtggtaagacttgtgttgagatttcttgggcgcgaattcctaaatgttcgcacacataggcttcgacaaacggtggaatattggcaaacgtgcccaccgccccactaattttaccggcttcaacgccttttgcagcttcttcaaaatgtgccttatgtcgttttaattccgaataccatagtgctagcttcaacccaaacgtcgttggttcagcgtgaacaccatgcgtccggcccatcatgaccgtatcttggtaacgtttggcttgtttggcaatcaccgccaatagcgcatcgatatcggcccgcaaaatggtgttggcttgtttcaacaaataaccatacgccgtatccaccacatcggtcgatgttaaaccatagtggacccacttgcgttcatctccaagtgattcagaaactgctctggtgaaggcgacaacatcgtgccgcgtttcctgttcgatttctaagatccgtggaattgagaacatcgcattggcacgaattttcgcaacatcttcagccggaatgtgtccgagttctgaccaagcctcatccgctaaaatttcaactgccagccatgcctcatatttattctggtccgtccaaatcgcacccatttcaggatttgtataccgttcaatcatttattagcgtcccctctagtcccaaattttagtctttttaattgccgttaacgtttcatcaacagccggcgttaataacgtgacgtggcccatcttgcggttgaccttttgaaccactttgccatagtcgtgataatgccaatctgctgactgccgactggctgttagcgctgcttgccagtgctgcccaagaatattgaccattaccgctgattgccacaattgtggtatttggagtggccagttgcagacgccccgaatgtgggttgcaaattgagaaaagtcacacgcttcaatcgttagatgacctgaattatgcggccgtggtgcaatctcattaacgtagagttgcccgtcatggccgacaaaaaactcgacacctaacgtgccgactaattcaatctgcgtggcaatttttgccgcaaccgattccgcttgtgccgctaacgccgctgaaatacgcgccgggcagatgctgatatgtaaaatgttatctcggtgttgattctcgattgcgggaaaaacggcttgttgcccggctgaattctgactaattatgaccgaaatttcttgatcaaaatggaccatcgcttctaatacacaaacactagcggttaacaactgttgagccacctccatatccattgcggaccgtagaatgacttgtcctttaccatcatatccaccgcgcgtggtcttcaagatacaaggaaaaccaacttttttaacagctggtattaattctgcaggggtcgttacaatctcaaaggtggcatgtggtagctgttggtcaacaagaaattgtttctccaacaatcggtcttgagcaatccgtagcgccttcgtcccttgaggaatccatgtatattctcgggcagcttcaatcgtcttagcatcgacgttttcaaattcatatgtcaacacatcgacacgttgcgctaacatcataatttgtgcctgatcatcataagctgccacaatttgatcatccgcgacttgtccggctggacagtctgcctgcggatctaagataatcactgcaaaccccatctctttagccgctaatgtcatcatctgacctaactgaccgcccccaacaatcccaatcgtttgccctggtaaaatttggttagtcaaagtctgcattacttgccaccgcctttgcatgcatccgtgcttgatactgttgcagtgccacttgataagctgggacctgcaagccacaaatctgtgtcgctaaaataccagcgttaacggcccccgctttaccaatcgcaaccgtcgccactggtacgccacctggcatttgcacaattgataataaagaatccagcccactaagtgccttactttgaattggcacgccaatgactggtaagactgtattggcagcaatcatccccggcaaatgtgcggcaccacccgcaccagcaataatcgcacgatacccgttcgcctgtgcttcttttgaaaaggcgaacatttcatccggcatccgatgagcagaaataatctgtttcgtataactcacgcccaactccgataatacagaagcggtctgttccattgttccccaatctgatatagagcccataacaagtgccacatcactcatattctttacccactttctcgttgttgattatgctttgattctaacaatcttcatctgatatgtcaaaatattttacgaactattttacataaatacatttaataattcgtatttaaatcataaatacacaaaaaaaacgattaacctgttggttaatcgtttttttatcgttatggcaatacaacgaagagtaatgcacctaaaatcccaccgatgattggaccgacaactgggatccagctgtatgaccagtctgaatcacccttgttggcaatcggcaagactgcatgggcaatccgtgggcctaaatctcgagccgggttaatcgcgtaaccagtcgtcccaccaagtgatagaccgattgctgtgataaccaccccaaccactaatgggttcaaaccggctgttaattcaccacgtgttaatgctagtaaagcgaagattaagacgaatgtcccaatcaattcactcattaaattggcaaatgggctgcgaatcgcagggccagttgcaaaagtgcctaagattgctgcttgatctttagtagcttgccaatgtggatagtattgaatccaaacgacaactgcgcctaagaacgccccaatcatttgggcgataatgaatggtaccaccgctgcccaaggggtcttgccaatcattgcaaaagcaatcgtcaccgctgggttcaagtgtgcaggtcccataaatgcagaggtatatacccctaaagtaaccgcaaagccccaaccaagcgtgatagcaacccagccagcaccgttggcttttgtttttgctaagctaacgcccgctacaacgccatcccctaaaagaacaaggataaacgtcccaacaagttcaccaagcgcctgaaccattattgaatgttccatgagatttcctccaagttaagtcctattttaaatagtctaattgtgcttcagcaattgctgaatccaataattctgtttgacgtgctttttcagcgtcatcccagttcaataaacgcgccatttcatcaacaactggttgtttgatggctgctaattgatcattgtggaataagatgaagtttgtccgtcttaaaagataatcaactggtgttaatgtcatttcttcgttaactgagtatcttaagctgattgtttctttcaagttcaagccttcagcagcaccttggtccgcgtatgaaacaacccggctgacgtttgaaccgaagcggtttgctaaatcaatcgcatcttcttcatcaatccctttgttcatcgcaacttttgcatagaatttaagggtatcatccacgttatttggatcgaagtgcccacctgaaacttgtaatttcttagaatcgatttcacgaactgttttattgaaatctttcttcaagatatcccggattaattcaagcgcaccggctgccatcttacgataatcagtaatcttaccacctgataaagtgattaagccgttttcagccactttcaaatcactaccacgagaaacttgtgatgggttgactgattcttcagcatgcgccgttcttaattgactgattgctttttcaacatctgcacgagcagctgttttgttttcgtaatcatcaactgtcttgattaagttgttgaatgattcttctgaaaccttaccgctattagcgccaccaccgttataatcggagctaccgttattagaaattaatggtcgtaaacctgcccagctagcttcaatatcgtttaaagcgatattaacgctaggatagcgattgttgattgcttttaagaggtaatcaacgtctgcttgttcaacacgtgggtgtttgaaatcgcctgtgtaatcagtatcagttgtcccgaagtacgtcttaccttcgcgtggcacaacgaaaatcatccgaccatcatgtaagcctgaatcgaagtaagttggttgtggcactgataaacgactactatcaacaactaaatgaatccctttagtaggacgaagtgtttcttgtgctttgacttccgtgtttaaagcatttactttatccacccaagggccagcagtattaatgactaatttggcatgaatatcgaatgtttcatccgttaattcatcgtgtgctttcaaaccgtttacgcgaccgtttgcatcataagtcattccgactgctttaacgtgacttgcgattgatgcacctaattcgtcagcttctttaatattttcgatgactaagcgcgcatcattattgacgaaatctaaataaacaccagcacccatcaaacggtctgacttcaagccaggttcgcgttggagtacttctttacgatcaattgtatagttggcatattgtgtaccagttacccctgccaatttatcgtataaatccatggcaatcttgacactgaacatgtcgtaagttgcttcaggttcatcatagattggtaaaagcattggtgtaggccgtgggatgtgaggtgcaatcccttgaacaacggcccgttcactaacagtatctgcaacaaccccaacgtcgaaagtctttaaataacggataccaccgtgaactaacttcgttgaacgtgatgaagtcccttcagcaaaatcttgcatttcaatcaaaccggttttgatgcctgatgcagccgcttgaatagcaaccccagcaccagtgatcccgccaccgattactaataaatcaagttgttcgttctttaagttattaattacttgttgacgtccttctaatgaaaatgtcattataatcctcctcattcacgcattttatatggtcgatgtttgaaaacctttgttgcttcaactgcttgttgccaaccagcatagagatcttcccgttcttcttcaggcatttctggttcgaaacgttgcccaactgagaaaatatgcgccaattcgtctgtatcttgccagaaaccaactgctaaaccagccaaaaatgcagcccccattgcagttgtttctaaattagctgccttttcaatcgagctattcaaaatatctgcttggaattgcattaaatagttgttgtttgcagcaccaccatcaacgcggagcactttgatatcaatgccagtatctttttgcatggtttgaacgacatcccgagtttgataagctaatgattgcagtgttgccttaataacgtcttgtcggttcgtcccacgcgtaatccctagaattgaaccacgtgcttctgagtcccagtatggtgcacccaaacctgtaaaggcaggcacaacataaacttcatttaaactggttgaagccttagcggctgcttctgaatctgatgatttttcaaccagttgcatactatcacgcaaccattgaatggctgaaccagcaacgaagactgagccttcaagtgcatagttgactttaccattgattgaataaccaattgtcgttagcaagttgttttctgacattgttggtttttcgccagtattcatcacaataaatgaacctgtcccataggtgttcttaaccatccctggttggagagctaattgaccaaataatgcggcttgttgatcccctgccatccctgaaattggtaccgtgctaccatagaaatgataaggtgctgtttcaccataaatttcagagtttgaccgaacatcaggtaacatggcccgtggaatgtttaaaatcttgaggatttcgtcgtcccaatccaaatcgtgaatgttaaacaacattgtccgacttgcatttgtatagtcggtaacgtgtgaagcgccacctgttaacttccatgtaatccaagtatcgatggttccaaagaggagttcgcccttttcggctcgttcttgtgcacctggcacttgatccaaaatccaacgaatcttagtcgctgagaagtaagcatcaattaatagccccgtcttttgatggaataattcttcatgcccatctttcttcaattgttcggcaatgtcatttgtttgtcttgattgccaaacaaccgcattataaattggtaaaccagtttccttatcccaaataatagttgtttcacgttgattagtaatcccaatccccgcgatttgatggggttgaatccccgatgatataaaagcgtttgcaatcgtcgataaaacagcgttccaaatttcgtttgcattatgttctacccagcccggttcggggaagtactgggggaattcacgctgtgcatcggcgactttttgaccattgtgatcaaaaatgattgaacgagtactggttgttccctcatcaatcgccaaaatgtatttttcagtcatcttaatcctcctttaacaacaatgttaggaaaacgtttcctcgaaaactattatagattaccgatgtccaaaaagaaatcgttttacccaaattaaattttacacaatttaacatccttaccaattcggcatttgtagcacatccaaaattaaaaaacgggtcaataatctcagatcaacactaattaaagtccttcatctgaatcattaaacccgtttttttacttaaatcgttgcagttattttagtatataattcaccgctcatcttgctgagcgaaaccttttcgttcttttcgtttgaaaataacacgatatagattcggccaccgtggctaaatccgttcgacacattccagcctgacaaataaccacgattaacaatgagtgctggatcattgtaaaagcccattccatagtgggacgtactccctggttggaacatttgagccttactctgttcattaattaattttccagtccacaacgcgcggtcaaaacggtacatatcagtcgccgtcatatacatatctccgacccctggtagttgcgtgaaattggggagttgtcccgcagcgccatttgccagatagccaatggaagccgctggtaatcgcgaatattgatccgtcatgaaaccagtgtgcgccattttacttggttttagaattttttcttttagatacgttttgtaatcttgatgactcactttttccaaaaccttcgtcagcacaatatagttcgcatccatatagtgccacttgcccggttgttccttaatcccatttttaataatttcttcgattaattggtcgagagtcttcgtctgattatcttggtcccgaccgacaatgcctgatgtatgatgtaaaaaatcagtcagtttaatctgctgcccattcggaaagtccgggaggtaccgactgattggatcgttgacgtttagctttccttgttcttgtaactgcaataaactcgttgcaatcaacgctttttcagttgaaccaatcgcatatagcgtatctggcgtattcaccaactgcttggcccgattagcactgccgtaccccttatccaacaaaacttgcttatcgcggacaattaacgcggtacctgaaaagccaatttgctttaagtagtcatctaacgcttgttctgcaacaattgtcggttggctttctgctttaagtcgttcttcctttgctttagcagcagcgactttttgtgattcgcgctgtttctttgcttcttgcgcttgtcgttggcgcttaatcttggcttgttgttgcgcgatttttacttctcgttggtgatgttgtcgctgaaccacaattccgcccgctaccagaccgaatatgaccagaataccaatgacaccaccaatttgacgccctttttttgacatcaactgtccctccgaaatttctaatctatccattaatttattacaatattaatgtacaatacgcttttggatttgaacagtgacattattgtcatctaaccacacgcaaaaaagcggtcgcgacaaaaaatgtcgtgaccgcttttttggaaccagacgttcttatttaactaataaaacattcgttgcagcatgggcactaacatattgggcaaccgatcccatcatcattcgttcaatgacccctttccccgtaatccccaacatgattaaatcaatcccatattcttcaggaatgcgaatcgcaatttcttttttcggtgagccgacttccagaatcggggtgaccttcgttagcccatgattattcgcgtaacgaatattagccgctagttgctccttcacacgatctttttccatcgccgtcatcttcgcatagacactagcatccggtgaaacatagactgtacttggaataatatgagccacataaagctcagcatcatttcttttcgcaacttcaacagcttccataaatgccttgttcgctaagtcagatccatcgaccccgactaaaattttcttatacgttgtaatcatctagcaacaccctcctattaatgaaatgaatgcgaatcctaactatatgttcattatactgaacccaataggaccttgacaatttaactgcctaaacaaaagacatatcgttaatagctatagtaccgtcgatggtgcacgaattcgagttaaagaattggtatctctaaaaagcctaatatatactgaccctaagttaattaacgaaagcacttaatagctatctcatgcactcatttctaaatcaatcaacttaaataataattttaaaaagaaaggactgtcacatatggatattgtcataaccggtggaacatctgggattggctatcgcattgccaaagatctcattgcagaaggccatcaagtcattatcatcggacagaatgcggcaaaaggccgggcttctgtggcccaacttggaaaagcggccttttttatccaagccaatttagcgaccaaatcaggacgcaaccaagcactggcaagcatcaaatataaagtggataaaatacacgttctagtgcacactgccggtgttttccccagctcagcagaagaaaatattaaggctaatttagtcccccattatcagctaacaatgggcttagcagaccgattaactggcggtcgcgtccttatcataaccggtgatccgcaaatcattcaacaactcagcatttgcgaagaacaggagactactttacaacgtgcaaggtggttattaacccataaagctttattaaccctctttctcagttatcttctggctgaaaaagagattacggtcaattcatttttcccagggaatgtcaccgatgagctaccgcgttattcccaaacattgctgcatactgaagtgccagttggaaaatacttagcactccatcccgatctaacgcagagcaccggtaatttttttgataatgatcgcaacttggtgttactcaatgctcggcaatacaactatgataatgccgaaaagcatttgttacagtatttaacagagtaattgagactataaaattgcttatcattagtggcaacatgagaatattattttccactaaactaaaaaaggacctgagacagtttttgtctcaggtccttacttatttgattgaattgattgtataaaaaaaccccgcggatgcggggcacaaatattaaagtttaacgatgtttgttgcttgaggaccgcggtcgctgtcttcaacatcaaatgatactgcttggccttcgtctaatgacttgtaaccgtcaccttggatagctgagaagtgagcaaatacgtctttgccgtcttcaccagtgataaaaccaaaacctttgtctgcgttaaaccattttactgtgccgttgttcataataatttcctcctgatacatatcaatgtacgttttttgttgcaataaattattgataggtaaaagaggaaggtattgtgcatccaaaactcaaattacgtttcaaaatttgattacttgaacagtatagcatggcattttctaattagcaacccgcatcccaaaactatcgactaaatcgctcgcaattcattcgcaaaaggctattaaaataggctttaaagcgcataaactttttatttaaatatttaatttctaatcattttcgaaccgttttgtaaactttgcctcgctaagtgccatcaattcctcaggctcaatttcatatttcgaacagataatgagcagttggtcgaagcaatcggctaactcctcttttaagttagctcgcttttcagcgtcgtttttaacttttttccctgggtgatcacgcccaagttcaatcgttctaacggcccgtgacaattccccaagttcttcactcaagaagttcaaccgaattaatggtgaaaatcgataccaattccgttgttgataaaaatcaactaaccatgtttgatgcgcttttaaataatcttgcattttacattcactccatcattaaaaaaacacctaacctcgcaagcaatgtgcgaaattagatgtctccaagaattattgaatgtcacaggcgagattcgaactcgcgacctacggtttagaagaccgttgctctatccagctgagctactatgacctcattgattgacggtttttgctgtcagaataccacacaacatgctatattataagcaattgaagtagtcactgtcaattaaaattcgcagaaatgagggaaaaacatgcaattaaatcagtttgcacgcttaactaaatctcaatctgaacaaatcacggaattacagcgtattcatttactcccaaaggatttcacccagctccccttccaagtccttacccaagatatttttcaacggctgttcccagaagcacatagtcaatcaacccagagcgggcaacttagtttattacaagccacaaccgaattaaatctaaccgcctaccttgaaaccattgatacttcattcgatcaagttgtcttctataatgtcgccctccaactcttgggttttgaaatgacaaccgattttgaacttgatcaacccactgcttttatggccgccacaaaactcccatttatcgatcaagcggcatttgatcagaccactttcatcgaagccctttatctcctattaacgacgcgtagccaaactgggttactttatctggatcaattggctaaccgtggtttttttgcagactggcaaagtgatcagccccaatttctcatcttcaatggtaaggtccagcccgttttcgataccagccatttaattcgagaagtcgtttatgttgaatcgagcctagatactgatcaagatggccaacgcgacttattagaaacgactatcttcagaccacgcgaaactgaagcaggcttaaaaattccagcactctacactgccagtccttactataaggggattaacgacgtcgatgctgatttgcacaatgttgatactacaattgcgactaaacccgttcaacaaccaagcttagctgatttaacccaaacgccaaccactgcaccgcttcctcaacctcgcgccgttaatggcacaagtatgacaactgaattaaacgcaacagatgacagcaattacagtttaaatgattactttctggcgcgcggatttgcgaacgtttacgctggcggcattggcacacgcggttccgacggcgtccggacttgtggctcacctgaagaaacagcttcaaccacggctatcatcgagtggttagccggtaatcgacgagctttcaccaaccgcaccgatggcattgaaattaaagcttggtggtgtaatcaccaagttgcaatgactggtaaatcctaccttggtactttagccactgctgctgcaacaactggcgttgaaggtctgagaaccattgtagctgaagccgccatttccagttggtacgattactaccgcgaaaatggcttagtggtcgccccaattgattgtcagggtgaagatgccgatgtcttagcgaagttgtgccaaacccgccaaaaagatgccgctgatcatgcgctctctggcactttcttcgccgaccaactcaaagccctgcaagaaggtcaagatcgcatcacaggcaattacaacgccttctgggcagcccgtaactatcgtgacaatctcgccaacctgaattgcgatgtcatcttagtccacggattaaatgattggaacgttaaactacaaaatgccggcgccttgtgggatttattgcgcgatcaaccggttaataagaagcttttcttacaccaaggtgaacatatctatatgaataacattcagtcgatcgatttcaccgatatgatgaacttatggttcacgcatcaattactcggcgttgagaatcaggctgtcacaaaattaccggctgttacaattcaagacaacgcacaagaagccacttggacgacccaggcggattggctagccctcgacaatccaactacgactttctggctaaacgaacaaacattaagcactaatgctaccgaaaatgccccactgacgacttttaaagatgacggtgttgcggcctttagagcccaaaaaatcagtacagccgcttggcaagatgccttaatcgcagatcaatcaagtttcactggcaaccggttgcgtttcttaggctccccgcttaccgaaccgctcattattgatggtcgaattcagtttagaacaagggtcgctgtcaatgccgaacgtgggctattgagcgtgctggttattgactatggtcaattcaaccgtttaggcaccacacctgctgtattagctgctaaaggccaacaactcggctatcagtggcgctatgatgatttaaaggaatttaagctcaatcgaccaagcaattatcaagtcatcactaaaggacacatcaatctccaaaatcgccacaatagttatcaaaccgacgccgtcaccccaaacgaattctatgatatcacgctcgacctacaacccacccattatgatttaacagcgggacatcaactcggtctattagtctacgcgactgatatgggaatgacgattcgtgaagagcaagcattcgtttaccaagtcgacttggctgctagccaactgattgtcccccatctaaatgattaataaggagtctttttataatgtcaaatctcatcacctgtcgtcaaaccctctccatcagtaaccatcgcgtcttcgtcaatgatttgaacgaacatgaaacggtctatggcggacgcttgcttgaactcttggatggttcggcgtccatttcagctagccgcttagcgcgcgtcgaaaccgtcaccgccagcatcgaccaactgaacttcattgaaccattcaaaatgcaagattccttgtgcatcgaaagttacgttgccggtgtcggcacccgttccattgaaatctttactaagattatcggtgaacatctcaagaccggcgaacgattcctcgggctaactgccttcttaacctttgtcacaatggaaaaaggtccggcccttcctaacattcaacccgaatcaccggaagaacggttcatctgtgccggttatgaggaacgaaaagcccaccgtctcgcaaattttcaaagtcaaaaacatttcaatcaaaatatcagtaccgattatccatggaacggtcaataacgaacaaaagaggtgtcgattctcatcatcggcacctctttttatttatcttaaaagttaaacgtccggctccattcatgtgtgccacgatattggaatggttggcttttaaaacccgccatcccaaaactaacggtcattaaaataattcccacaagaatcatacataaactaatcttcaaccaatttttcaacatctacgccaccacctttaatcgactacggaacatcccaactagccagcgtgtgattccaaccgagaaacgaattaagtatttcgtcatgtaccaggtcgcccctgcacaaatcagccccacaccaaccatcacaaaactaattccaagctgcatcaccgcaattatccagccttcttgtaagccaacaaagaacgataaaactaagctgacactcccaccaagaatgccggcagcagcaaagattgcccccagaaacgggcctaaccaaatcaagaaataaccaagtgccactaatatgatggcggtcaataacaacgtgccccataacggtgaccctaaaactaacaagatactgattaaaataatcaacatcggtgccatcttcttttggcgaaccggtttatctggtgtagctaattgcgctacaatctgagctggcgttgctaaactcgcgataatctccgcttccgtttcacccgcttccagtcgatcatcgattaattcatcgtaataatcaatcgtgttggctgcatcactaatcccataccgcgttaattctgccgcaagctgtttaataaattgattcttagtcattgttacactcccttatgtaagtataaatgcccatcactgccggccaatcggccaaaaaactatcaatcgatgcttgtcccgccaatgttaaatggaaatatttacgcaagcgtccattatgttcgacccgataactttcaatttcaccctgcgcctcgagccgtttcaagattgggtataatgttgagtccgaaatttcaacgacactcgatgtatctttgataatttggtagccatatgaatcctctttcttaagcgttgctaacacacaaaattccaagaggcctttctttaattgtggattcaaaccgatcaccctttcgaaagttaatactatattatgcatagtattgtgtcaagcataaaaaaagaacgcccatcagttttacctgatgaccgttcttttgaaacgtttgataacagtcatatcccgactgttatcaaacccttaatctctgccgccgccaaaaatttggagcattgtgaggaataagttaacaaagtctaagtacaaggttaatgcgcccataacagctaaaccagaaaccgaaatttcaccagttgcgccgtattgacggtacatcatacttaacttttgattgtcccatgctgttaaaatgataaaaataattaacatagcgtatgacaagaagtagctaattgcagctgatgccatgaagaagttaaccaatgagacaataatcacaccgattaaccccatcattgcaaacttgccaaagccgcttaagttattctttgtcatgcgaccataaatcgacatggcaatgaacactaaagcacttgatgcgaaagctgccccaatttcaccaatgttatacaccagtaaaacggccgtaaacgtcaatccgttcaacgccgcatatgccacaaacatggctaacgaggccgttggattcttcattgaacgccgactaatctgaacgactaaaattaattctgcaatcatcaagccccaaaccatccacgagctaccacttgataggattgtgtaagtttgtgctttaaacacagtcaccattaaaacagcaatcagtgctgaaattccgacaccgacagccatcaaaccatacactttactgaaaaagcgggcttcgctgtcgacattcacaacgcgtctttcttccatgaatattcacctcttatatttctaaacgggcccataatcacccgattaggaatattgtaacaaatccatccagaaagacaatcaaaatgcctaaatcttaattatctttaggacttaaattactcaataattcttcgtaagcatattcgtatttttgcacatcaccagcgcccatgaagacaacgactggttggtcgaagtctaagagcggtgacatattgtctaatttcaagacgcggccacctttagtgattttcgcacctaagtcagcacttgaaaccttccctgctttttcacgcactgaactaaagatatccgttaagaagacttcatccgcaaggtttaagctagcggcaaaatcatccattaacgcaattgtccgtgtgaacgtatggggttggaaaaccgctacaatttgtttgtctggatatttttgccgtgctgcatccaatgtggctttaatttctgatggatggtgcgcataatcatcaatgattgtcacgtcagcaactttcttttctgtaaagcggcgtttaacacccttgaagtctgccaattcgcgtgccacttctttgccatcaattttttctaaatgactgacagcaattacggctaaactgtttaagacattgtgttcaccgtaaagtgggacgtggtaatggccgatgttttcgccatgatagtaagcatcgaattctgaaccttgcaccgtccgttggatgttgcgggcttggaagtcatcgtcttcgcgtgtcccataataataaacgggcacattagctttgattttccgtaattcaggatcatcaccccaagcaaaaatccctttttgaactttgtaagcttctgattggaacgcgtcaaacacatcatctaagcctgtgtaataatcagggtgatcaaagtcgatattcgtcatgattaaataatctggtgaataagctaggaaatgacggcgatattcatccgcttcaaatgcgaagaattgcgcatctttaatccctttacctgtcccgtcaccgactaagtaactcgtcttagccacaccacttaaaacgtgagctaataagccactcgtacttgttttaccatgcgcaccggccacgccgatacttgtatagcctttcaataattcacctaagaattggtgataacgaacgactggcaagcccatttcaagggccgttttaatttcaatttggtcatcttggaaagcattcccggcaatcaccgttaagccttcgtgtaaattagtttctgagaatggcagaattttaattcctgctcgttctaaatcgcgttgtgtaaacgtatattgatcgatatctgagccttgtacttgatagcctaggtcgtttaaaacaagtgcaagagcactcattcctgaacctttaatcccaacaaaatggtaaactgtgtcatttgttatcatcttttaaacgtcctcttttcaataaatcacaattatctatatgattaaactaatcccttatagtttaccataatgcgggtttgagctaaataatgaatgtttatttttctctgttatcaattgattgatctctaaaacgcaaaaaaagcagccacaaaaattaattttgtggctgcacttaaacggattctataggtcacactctagcctaatgctaaataatcttcgacattttggaagtagactttataccatgttaagaaggtaaagatggtccagatcttccgacggccgttaatgcgttgttctttattggcatctaacaaggccaataacttatcttgatcaaagaattctgcaacgaaatcttcgctaaagagtgctttgactttttcataatacttgtcatcttctaaccattgcttaattggcactgggaaacctaacttaggacggttggcccaagctgttggcaaatgtttagcagaagcttgacgataagcgtatttcgtatcatgactattaattaagtatttagttgggacttcaccagcggccttagccaccttaggatccaggaacggcacgcgtaattctaagctgtgcgccattgaaatcttatcagccttttgcaaaatatcgtttaacatgaagtgatgtaagtcgatatattgcatttgtgagactggatcagcatccgcaacgttatcaaaatcagcttgatagtttgcttgaatcgttccatcattttgataagcaggtttcaagaaagtattggcttcatctgccccaaaaatacttggattttcgatatcaaaaatcacagattgacccgtatagaattcacgcgggttcgccaaattcgtgtataaatggacgcgacctgggaaggctggcatcttcttaacggctttggctaaactggcacgcgcacccttaggtaatttcttcaagccagaagtgaaggccttaattgttgaattgtgggagtgcatgccgtagttgacatagccagcgaataattcgtcggccccttcaccagataaggcaaccgttactttttcacgggcaaagcgtgacaagaaccataatggcacacatgatgggttcccatctggttcgtccaagtaatattggattttgtcaaattcagcaaacgcatcatcggcattcactttggtttcattgaagttcaagcctaattcatcggcaagcgcccgggctgctgtgacttcattataggtttgatcatcaaacccaacactgaagacttcttgcggttgcaaaatacttgtgacataactactgtcgaccccttctgataagaaagccccaactggtacgtcagccacattatgggctttaacggattcttcaactgcagcatcaatcttagccacttcttcttcgaaagataagtttgaaggattaaatgacatatcccaatatttttcgatgtccaattggccatcttgataagtgaaataatggcctgctgggaatctgaaaacacccttgaagaacgtttcttgtaaatcattgtattgattcatcatgaatgattttaaggctgtcttatttagttctggtttaaattctggatggcgcatgaaagttttaatttcactactgaacatgaaagtcccatctgctaaagtcgtgtaataaaggggcttaatgccgaagaaatcacgagcaccaaataattgcttagtttgtaagtcatagatgacaaagacaaacatcccacgcaattttgtaacaacctctttaccccattcttcgtaagcatgcaaaatggtttcagtatctgaatctgttttaaagtcgtgaccaagtgcgatcaattcagtccgcatttcacgataattataaatttcaccattgaaaaagactagcttagtgtggtcttcattataaatgggttgatcaccctttgctaaatcaatgattgataaacgccgaaagcctaatgcgactttatcatcgataaaatcaccatcaccacttggtccacggtgtttaatgacgtccatttgttggttcaatacttcttttttctttggtaaatcaaataatccaccagcaaatccgacaatcccacacatatgtttaacccctcttttgtgttttactgcttaattgactgcaaaacgaaataacaattaaagggtttgtctttaaccaattaattgctatctattatcatactattttaattttaataatcccataacaaaatcgtaagatggattattttagtagggctgcgactgcatctgctgtcacttcacgaccgacttcccaatcatctggcaagaccataatccctttagcaggagcaccagcaaccccgatttcacgggctgcacagatcatgccgtcactttgaacaccgcggagttgaccaggccagataattttaccttctggcatgacagcgcccaccgtcgccacaatcactttttgtccttgtgcgatattagcagcgccacaaacgatttgaacggtttgatcaggtgcaatctgtgtttgagtaacgtgcatatggtctgaatcaggatgcacatcacattcttggacataaccaacgacaatgtgtggtgtttcatcagccactaaatcaccggtgaaaccagctgctacaagtgcttcatttaaaacagcaacttgctgttcagttagtgtttgaacaccgttgaattgtaaatcgggcaataactcattcaccgctaagaaattatagccgatggtttgatctgcctgatcactaatccgtacgattgattgtttttcagttgtcacttgcttttcaacatcaggttgggtcattaccactaagatgttgggaaaagccgcttggttcatacttgcaattaacatttaatgactccttcaaggttagttcaatgaatgaataaatccagtaatttcgcgttttgttttccgatctttattgacaaaacggccgatttctttaccgttatcaatcacaacaaagctaggaatcccaaagatttcccattcttcacaaatatcgataaattggtcccgatcgatttcaataaagtcgtattccgggaattcagcttcaatttctggcatggctggtttaataaaccggcaatcactacaccaagttgctgtaaaaaataaaacatgtttcccttcagtaatcagatgagtcagattcgtatctgtcatcgctgctaattctttcattatgcaccccttcaattttactactcgttttaatataagcggtttgtccgtaaatgtccactccttaggaccaaaaattatgctatactatttaaagacaaaaacgactgaggagtttttctttgaaaaaaaatgggcaaacgtttaaatatttattaaccggcatcggttttgcgctggcggcggctgccagtgcgaagcaatatcgggcgcaacaaagaatgatcaaattaaaccaaattttagaagatgttaaagccggcttaaaacatgaaggccagattgtgggttcttggattgaagaaagtccccacttattctcacaaaacaaacggacctttccagtctatcaaggtggcatcatctgcgagcgtgaagatggtacaaaccaatttcgattcaaggtagacgcaagaaccggcgtcgtgattgaattctcacaaatttaaagtgcgcagcgcggtgggcacgttctgaggattagcttagtcagacgagtgaccaatttattggtcgcttgactgacgttgctaaccacgggaacataccgcgcggagcacgtttcaaccaatattataattaaaaaggtacgctatcctagataaaatctggataacgtacctttttgagttgaaacgtgctttatcacactgtcttttccggttagctacagaaaggaatcgatggtaaagaacccccatcaatccctttcttaggctaatcctcaaaggcaacccgtgtgataaaaacactcttgctgaaacgtgctattgacgctagatttctgcgcctaactacacctgtcaaattagcgattatatcactcattcgccagcctatgttaatgctcaaaatctgaccgagcgtcaagtgcactcttatctaaaacgtgctttcaaagctagcaccctgtgcatagctacgtccggcaaacaaccaattgcattggttattcaccagactaggctattgctcgggtgctgaccagctttgaaagcactctacttgtagtgtgcctctaatctgtaaatcacttggccgcgcttgctgaatttttcttcgtattccgtttggatgttgtcttctgcaagttcactattgtgtaaatcgagtgagatgtcgtcaaaaaccatcccataatcattcaggctcatcaatgagtattcgaatagaccttggttatcagtcttgaaacgtaagtagcccgttggttgcataatttgttggtattccgctaagaatgacttatatgtcaatcggcgcttttcatggcgcgtcttaggccatggatcagagaagtttaagtacacccctgccacttcgttttcagcaaagaaagttgttaaggctgcgccgttacccaataataattggagatttggcaatttcaattcaacttgtttttgtaaaatgacggcaatcgctgattcttggatttcaactgcgataaagttccggtctggatatttttgtgccatctgagtgataaattggcccttacctgaacccacttcgatgtaaatgggttgttctttggcaaaacgtatttgccacttgccggcgatatcttccggactcactaaaatcatgctggggttggccgcaattaagtccgccgcccaaggtttatttcttaaacgcattatgttctccttgttgatgccaatcaaaaaggttggacacttgcccaacctttggcatttaatttttattaattatttcagaaatcactgcttctaagcgcaatatgtcacggttcatttcagtaaaacgaccacgttgataatggtgcttaatgctttggagtaggttcaaactgccgtaccagttgacgcgcatcattaattcaggcgtcacctctaggccgtagttctcaagccactcgtgccattcttgacgtggaacatattgaaataaaatcattccgaaatcgactgcagggtcggctaacattgccgagtcccaatccactaagtagagtcgattaatatccgataacaaccaattcttatggcttaaatcgccatggcacacctctgcagaaggtgcttgtaattgacgtaacgtttgcttcaaataatcagctgtttgttctaaaaatgggtgttgccgtaaatcttgcggtaagtcgtaaaaataggcttgcaacatttcgtttgctgaccagacacgaccgccaactttttgtaacattcgtttcaatagttgggattgatgcacccgtgctaataacttagcgacttgtgggctattcatctcatcacgtttcaaggttcggccgttgagccactcttgtgcggttaagacatccccactcgaaatccgcttcgtccagattaagcgtggtgttatgccttctgccgagagcgccgctaaaaatggtgatgtgttgcgctttaggaaaatcttttctgacgcgcgaacgcctaaaaatgcagcgcccgtatcaccaccggccggacgaacttgccagccagtatccaggtcaaaattcatcagcctcgactcctcttcaataaaataaagcgccaaaatacagcgctcacgttgcttcaactgtctaataactaagggtatcatataataattagccagtagtcgtcaagtaggaaagcatgcgtgtcacagggactatgcccccaaccgtttaggcaaatagaattgaacaaagccaatcacgagcacgaacaatgctaaaacacttaaaccaacttgaatcgtcatccctagtgtcactaataaaatgacactaaagagtaacgcctgaagcaataataaagtccgcattaattggctgaacgcttgaattcgtttggtcgttggtactgggtatagatgagtgaaaataatttgatcatactgattgtaaaacggtaataattgaaaaccaactagataaatcaatagaagtccgagtgccaaactcaaccaccatatgtgactgaagcacagaatgatgccccctaaaacaactaaccggatatataacccgctgaattctgtgccccgcaaaaagccacgcgcatataaatagaggtaagtattggctggtttagctgtaattggctttaataagccatctaaatagcgacgacgcttaacctgactactgagccctggcacatccgtgaagaggttatagaggcggtaaattcgtcccattcgagaatcttctgcaccaactgccgctaaccaatcgaatagctgtgtcttttgaacacgcgccaattgttgtcgctgataataggctagtccaagcgctacaagcactccgactaaatttagccactgatataattgactggcaattattgccaaatcaaggattaacgaaagcccttttgttgcctgggtttcatccgcttggtaccactgacgcaactggattgaaaagcggcggtctttgatgattaccaatgtaatcaaggcaacggctatgtgccatgccgggaccgtcttagtaattaacaagagtggcgccactagaagcgtcacaaaagccattacaattaatggtaaccagctactatataaacgtgctgatttcaaatacgtcacaaggccactttcttttggcaataagaagacactatccgcttcttttaataatgttgctaggcgaccaaaactaactgccgcaagtaatactaaactcaatacaggttttagccaccaagcttgtggatccagtcctttgacggcgttagcatatgtgtagcccaacgctcctaataaaaagataatcgcaatcacgaaatgatcattgaaaacgaggcgcaaatacttcacttgttcttgaatatgtttttgcacgcgtttttgccataatgcttgcatggttaaccttctttcgtcatctgcagataaatatcgtcgagatcggcgtcagccatgttaaattcaatctttaattcttcaagcgtgccagtcgttcgtacgcgaccctgatttaaaagcacaaatgaatcagcatattgttgcgccgttgcgagaatatgggtcgacattagaattgcagctccttgtgcttttttttcagcaatgatttctaataaatcatgaattgccaatggatccaatccagtaaaaggttcatcgatgataaacaagtcagcattcgtcataaatgcattgacgatcattactttttgccgcatcccttttgaaaagtgaaccgggaaccagtctaacttattgtctaatcggaatcgttttaacaatgcattggctttaacccacgtctcttcaacgtttaaatcataagccatcattgttaattctaaatgctcctttaaagtcaattcagggtataagacaggcgtttctggtacataggctactttttggcggtattggtcaggattcgactgtaacgtcacaccgtctaaagtaattgtgcctttttgtggtgtcaataatccaatgatgtgtttaatagttgttgatttgccggccccatttaaaccgattaaaccaaccacttgattgtttggcacagtaaagctgacctcttttaaaacggggacgtgcgcgtagccccccgttaattggttaatctctaaactcataatcaatagcctcgttttttggtttttaaaactacttttttagtgaatcctttttcatatcatatcttaacacgaagtaaactgcgagtgtatgcccccactcaatatttttccatccgcttacaaagctgatggcagtagcgaaaagcccttgtttatgatagcattaagctgtattgagacttcaaataagagaaagtaggcataattaatggatgattgtatcttttgcaaaatcgttcgaaatgaaattccgaacacagtggtctatgaagacgacgatgtcaaagccttcttggacatcacacaagtgacacccggccataccttgttggtacccaaaaaacacgtggcggacatctttgaatacgatgctgatttagctgcggccgttttcagtcgcattccaaagattgctaaggctattaaagctagcaatccagccatccaaggaatgaacatctgcaataataacggtgcggtggcttatcaatccgtttttcattctcatattcatcttattccacgttacacagcggatgattcatttgcaatgcaattcggtgataatagcgctgattacactgctgaccaactacaagcgatcgcagatggtattcacacacaattggaggactaatcatgtcattttcagaaggattactagttggtggcttattagggacggcttatgcccttctcactgcttctacaaccggccccaaacgacaacaagcgattgcccgctatttaaacgagctctcagaaagttcaactgatgttcaacaaagtgctgttcaattgcaaacagcttcgcaaaatttatcaaacgaactcaaaacaactgcagttacatcacttggtggtatcagtgatgcattgcaaacattttcatttgaagcagcaccacgaattgctcaaatcgaagaatcagttgatcgtttgacacaaaacttaaaaaaataaattcaccaaaaattagattgtatgcaagcgataaggttaagcatatcaacgattcccgcgtttttagcgtaaaacctaaatttgaaagttctgtgaagttttagacgcttcgttcaatttagttagtttatgtgttatattaattggtgaattcactacgaatttattcataaatattttgataaggatgtgtcatacaatgaagaaatggctattagccgctgctagtttattaatggtagtttcactagcaggttgtggtagcaagactatcgcaagcctaaagggtggtaaaatcactcaagacgaatactataaagaaatcaaggaaacatctgccggcaagcaacaattgcaacaaatgatcttgcaaaaagcgcttgaaaaccaatacggctcaaaagccatcgataaaaaagttaagaaaacttatgatggttacaaaaaacaatacggttcatcattcaactctgtgcttgcacaaagcagtatgacacctacatcatttaagaacagcatcaaaacacaatacttaacacaagcagcactaaaagataacaaaaaagtaaccaatgctgacttgaagaaacaatggaaatcatacgaaccaaaagtccaagttcaacatatcttagttgaaaagaaagaaacagctcaagaagtcattgatgcacttgcaaaagacaactcaacaaagaacttcaacgaattagctaagaaatattcaactgatactggtacgaagaaagatggcggtaaattacctgtcttcgatagtactgatacatcacttgactcaacattcaagactgttgctttcaaattaaagacaaacgaatatacaacaacccctgttaagacaacttatggttaccacgttatccggatgatcaagaaccctggtaaaggtaagatggctgatcacaagaaagaattaacagacatcgtttacgcttcatggcttaaagaccaaacagtgatgaacaaagtcatcactaaggtacttaagaacgctaacgtatctatcaaggacaaagatttatcagacatcctttcaagctacggcgttaacagcaaagcttcaaaatcatcatctaaataagcattaacaaaaagacccccgctgctggcgcagcgggggtctttttgtacatttattctgttggttgatctaaattaggatcttcgactgggcgatagaaacgccgcccatccattgcgaagagccgttcagtaaactgacctgcttccgcatgttgtaatgactgggtcatcatcgtgatacttgcatctaattcatcaatttgatgcagaacttctgcttcaagaacttgtggccggacaggtgaaccatattccattaaaccatgatgggccaagataacatgccgtaatagcaacatatcctcagcattcacgtcgatctttaatgtatcacaagcccgcactatctcttcatcaaccagtacaatatgaccgatcaaattgccacgaaccgtgtattccgttgaaacaggaccggacaattctagcgttttacctaaatcatgcaagataacaccagcatatagcaatgcctcatcaatttgtggatattgggcagcaatcgtcttagctaagcgcaacattgaaagtgtatgataggccaagccgccactaaacgcgtggtggttggtcttagccgctggaaaactgaagaattccgcttgatgtttttgcattaaatgtcgaaccaaacgttgccaatttgggtttgtaatttcgaataacatcgcgccaaattcgtcttgcatctcggttacttgcaccggtgctttaggaataaactggtcaactgtttgcggttcgtcccccgtcgttaagcgcagtttataaatcttaacttgcggattattttggtataattcccgcttaccttgtaaatggatcacctgacccgccgtaaatttagcaacgtcttcatcagaagcatcccagtatttaccgccgatttgtcccgattgatcttggaacgtaaacgcgatgaattgcttgccgtttttagcaatccgcacgtccgccgttttaattagtacaaataaatccagattctcgtcgttttggtaatcaaataatttctttgctgtcatgtgtcagccccacttcctctagatttaaccaatgatccgcttcaaagtgtgcttgcgtccgcggattggccgttaaataaatcacttggttggccgcactgagtcgttggagtaatgtccaaacggcgatttggcgttgatcatcaaagttgacgaatccatcatccaccaataaaggtaatgagactacgtcagctacctcttctgcaaacgcaaagcgtagcgcaatgtataactgctctgcagtcccctgtgataattcaccgacttcaaaaagcacttgatccgtccgtaaaaccgtcatcagtgtgtcatcgaagttaatcttaatataccgattctgggttagaattgcaaaatactgcgttgccttttccaataaacgggggaaccgttcttgtgaagcggccttcagcgtcgcttgaatccaatcaattgctaactgcttagcgagccactcttgggctaaatcagtaatcttagcctgttcttgtaattgtcgctgtcgctgttgttgataactgtcattatcgacaagttgcgcttgcgtcacgcgtagttgcgcaacagcttgttgctgttcttgtaactgacttgtcaaacttgccacttgttctgtaatttgagcggcttgttgcttaagctgttcttgactagcgattgcttgtaaagccgacaagtccgttgccaattcgcgttttaaatcagcttgacgttgttcattagcacggcgctgttgctcattagcaacacaactggctaattctgcggcggttgttaagttagcctttgctagtaatgctgtttgtgcagcgtcttgttctttaatcgtgtctgttaagcgtgtcacttgttgttgataataccggtaactctcgtttctttgtgcaagggcttgtgtgagttgggtaatccgggctttgaattggctcacctgggacaagttctcttcatgactgccctgtaacgcccccacccaatcacgggcaaaagcaaacgcatcccaatacatatttagtgccgcttcgattgcttgattttcggcttgttgttgtttgagcgccatggtcaattgagtcatccggcttaaagcatgctgcatcgctaaaacttgactgattggcatcgccgtttcgtagccagtttgcgccaataataccgcgctttgttcgtgcatcgtctgcaatattgcttgttgtgcttgtaaggcagctgtcttggtttgcttttcagcctgcaacacatccaacttagcgagcgcttgttgccaagcttgtttttgcactggttggtcatggtcagattgtttattttgccacatcatgtaaccaccatagccaagtgcggctagtccaacgaccgcaatgactttcagagcgcccggcaagaaaagaccaatcatgaatatgactacgccaatcagcatactcaattgactggcacgtccatcagtcgttggcgtttcttgtggttcaacctgactaactgccgcgttttgcgtggctaattgcgcctctaaatcagccagttgcttggtcagcacttgactggtcgtggttgccccattcatttcagcttcggtttgttctagttgtgcgcgttgctcatctgtcaaaggatttggtagttgatccgtttgccattgatactgcgctgctaattgggctttttcgctagcgagttgtgcgctttggttttgccgtaatccaagtaattgaatttgtttttgctgttcatttaattgttcaaacaatggcaccaacgtctcttgattagcttgataaaatcgaaattcacctgtttgatccaatgtttcttgaacagttgctacctcggattttgcttctgctaacgcctttgcattgcgttctcgttcgaccactaatgcttggtattgttcgtcaatcgttaagtcaaacggcgttgccttttcaagtttagtttgaagtgcttgccattccgcataacttggccaacgatcaagcaaatgttgcaactgcgcttggcgttgttttaattcagccacttgcttttggtgttccgtcattgtcgcaacggtactctgcaatagacgtgcgttcgtttcatattcttgataaccacgactagcttcgttaacggattgcactaactctggataattcttcaaagcaacattcaatggccacttacgcccagagggtttgaaaattttctgactgtccttatccagttccttggcaaagtcgagccactcatgactccccaccgcaccaatcgtcaataaatgctgcaaaaaatcagcctgttttagattaaatatctgatttaaatcctgttggttcgtttcaaaaatctgcgtaaacaaagcttcatccgctggtgccaagaggtcagctaagtaatcagcgccaaattcttggccttgatcgatgaccgttacgtcgcccccaaacttaccggaaagccgccgaatcacaatatcgcgatcatgatagctaaccagtaattcaccaccgtattgcgcgccgtttttgggcacatattgttcataccgttgtttagcggtcgcaaagccgaataacacgcctttaataaaggctgtaagggttgtcttccccgcctcgttttgaccataaaggacttgatagtcggtattcaaatcaatcgtctgatcatgccacttaccgaagcccaaaatggtgactgtcttaattcgcatggctaatcccccatcttcttctcttgtagaattgtcgtgactaagtccttgagatccgcttgaaattctggtgtttcaattgcttcccggataaagttttccttcattaacggctttgctttttccagaatattgtccggtgtcaagatagctgcagccgcttggtcccagtaggcttggtcaatctgactaaattgctgttgtgctgcaaaccgcaacttcaacgcgtatggccaatgcagtggttcactattttccaattggtcttgtaagactgccaataattcaccattattaatccgttgcaataaatcactcgataatcgctccgcgtgtgttagctctagcgccactaaactagcatgatcactttgcatcaattgggcactcaaagccgtttgcgattgcgttaagctcatgtcaggtgtcacctcaaactgttgacgttgccactcaatgaccgtcgttggtttgaacgttaaatcgaactgaccatctttggtgtccactaaataaaagcctttttcaccaggttcattcttatgccgcccttgtaagttccccgggtaaacaatcgctggtcgttcttggagaatctggcgcttatgaatgtgacctaatgcccaataatcgtaatggcaagcgttcaattcactaatcgtaaatggtgcgtagtgatctgtatcggccgttgctttttgactaccgtgcaacgtcccaatcgtgtaagttgtgctggcacgttgtggaaaatcaaccactcgatcagctgacaaccaccgttgatcataactgaaccctacaatggtcacactctcatgtcctttggtagtcagttcaaacgactctacttgtgctccaaaaacatggacattggcgggcaattcaaaatgcacttgattggcatcccagtaatcatgattcccgtaactcagatagaccggaatgtcgacatctgccaaacgttcaaattgttgttttaaaaatttctgaactggcaaactctgcgcttcttgatcaaatgaatcaccaactaataatacaaaatcgacggcttcatcgatggctgtctgaattaattttttaaacgccgtgaaagttgacgcatggattgtttcccacaatgctgtcggtgcttgttttaatccgacaaacggactgtcgatatgggcgtcagctgcatggataaatttcatcttgaaaaaccccattcttttggccggtcgtaaccagcttagataagcttcattataccattgccacgcggtgtgataaaggcgattagaacaaacgttctgtttttaggcaataaaaaagcggtgaatcgaaatcaatcgattcaccgtttgaaacgtgcttctggttgcaacaacttccgcttaatttaaaaatcgcgttaatcctagaacctggattaacgcgatttttgtattaatgctcagttgctgaccgcaatcagtcacactcttatttgaaacgtgctttttgaaactgacttttccagttaactacaaaataagactgatgacaaaatacgccatcagtctcatttttaggttaatcctcaaagccaaacccgtttcaaacgcattctatgcttggtagatatctgcgattggttttgagatgatttggtttaattcatccattgtttggcttaattgacgttcttgttccatcaagttcttgattgcgtcgatgtccccaattttttgagcaagttcttggatttctttaatttcgtcgtccgttaattcttgaccttgcatttgtttttgttgaagtgtcatttgttgcgtttggaatttcttaaacattgtgaaggcaatatcgtcttttttcaatgctgcaaaggcattttgtaagcctaaaaattgtggtaattcttgcaagtgcgttgccatttggttggcatcatcataaatattaactgtcattgtactgactcctttttccatgtatttaattgaaaaaacctttcaaattattataccattgattggctgtatctttcgctttatttatcccatctttaaaacccgattcaattgaatcgactaattcgttcgatgtcccactctgttcttttttcgccaacgattgagcatcttcagtatcaaagtccgtctgtgctgtggttggtaagagttgttgcatctcatatttaaagattggtgctaaaccgtcaatgctagtgttcttcataaagtgatcttgatccgtcttgtcataccccatccaagtcgcaacaacaatatccggcgtataaccgactaaccattgatctttggtcccaaagccataactatcaggcacttcagtactaccagacttccctgcgacttgatagccgttgggtttcgcataacgcccagtcccattattataaacgcccaacatcatgctagtcatttctttggctgttttttggctcataatccgtgtcttggatggttcggtattatcaacaatcacggcgccactcgcatcaacaatcttccgaataaaatgtgtttcagacaattcaccgttattcgcaaaagccgtataagcactggccatttggtaaggtgaaaccccaccttgccaaccacctagagccatcgccaagttttggtcactcttgggtactgaaatgccgaatttttcgaccgacttaatgccgcgtttgaggccgatttgatttaataaccaaaccgccggcgcatttgtactgttggctagcgcctgatacattggcatcgatccggtataaacgttatccgggttcgttggtatatagtggttagtcccatagctttgcttcttatcttcaagtgatgaatcatagtggtagccatcttctaaggctggcgtataaaccgccaatggcttgatggttgatcccggttgacgcttcatctgtgtaatgcggctataaccacggattgtatactcaccacgaccaccaacgacggctgataccccgccggttttcggatcaattgcaactgaactaccttgaactaaggtgtcatccgcagcgttatcagggaacaaccaattttgtttaaaggtggtttccatcttactttgttgggattggtcgagggcagtatagatcttgtatccgttcttaacgaggtcttcttctttcaacccaaagcggttaatggcttcattcacaacctcatcaaagtaatacggataacgatacccatccgactgctcgtaggtattcgtcacgacaagttgctctttcttagcagcgtcggcttgtgcttgcgtcaacttgttattatcgaccatcaagccgagaattaagttccgccgcgcagtcgcattatctaaatggtcagccggattatagaaactagggctccgcaacatcgctgcaatcacggcgccttcactagcatctaattcactcgcattcttaccaaaataccgttttgacgcatcctgaacgccccacaccccgttaccgaagtaggcattattcaaatacatcgctaagatatcctgtttggaatagaccttggtaatctgaacagctaagaataattcctcaaacttccgcgagaacgtctgcttctgactcaacttggcattcttggcgagttgttgggtaatcgtactcccaccaccggtaatctgcccatgatgaatcactaacccaactgctgctcgtgctagccctttaatactgaatccatgattggtataaaaggtccgatcttcagtcgacaaaacagcattttgaatctgcggcgatatcttatcaagatcgacataagtccctttttgcgaatataacgtccccgcgcgttcatccttaatgtcataaagcgccgttggggtttgtaagttggccttaatctcaccgacgttagccgtcttcgctttaaacgtgagccagctgctcatcgcgaaaatgagaattaaaacagcgagaatcagccatctcgtcaattgtagtcgataccagacataacgaatcacgcgccagacgcgtttcataaattgtttaatcgccaaccaaaacggcgaagcttgcttgttcatgcgatccctcttcttacggtcaaaattaatcttgtttaattgtagcatattcgtcaattgacactgatgccaatcgaagacattaacaatcttttaaaatttacttttacaccaattttcgctaaactaatagcttaaaggtggttgaactctaatgataatttaccaaaaaaaagtgactttagagcccgactttagtccgatgtctgtccgcggcctgctgaatcactggttagtgccgcaaaaaatgcaacatttcttgcggattaatcaagatattttggtcaacggacattatctcgccttcaaccgacacgttgaagctggcgatcaaattacgatgaacttctcagaagtttccgttaaggtccaagactacgaacttgatgaacggcaatctttttccgttttatacgaagatgatgatttactggtcgtcaataaaccggcggggattaaaacccatccgaacggtcctggtgaaaacttcaccctaatgaaccaagtggcggcctatcttgctaaacaagataaaaaggcctacatggtccaccgcatcgatcaagcaaccagtggcgtgctcttgattggtaaaaccccaatcgtcatcggcattttaaaccgacagcttagtcaaaaaacaatgtcgcgccaatacatcgctattgctaacgatccggaacaaacactcttggaacatgcaacgattaacctcccaattggtgtcgatccatacaataagcgcaaacgcacgattgattacatcacaggtttatccgcagtgacccattaccaattactgcatcgaaaaggacctgcagcaaccttggcagtcaacctcgaaacagggcgaacacatcaaattcgcttgcacctggcggctgatggtcatcccattttgggtgatccgttgtactttccaaccgattcaacacagcgcctactactccacgggcaaacgttgcgctacacagagcccttcacggatgaacaaagaacagtaacagcccccatcccagacatttttaaccagtatgtagattaaagagtgagttatcagccggatatctcctgaggattaacacagaacatgtttagctcaacaaaataaggcgttgcgacaaaaaattacttttgtcgcaacgtcttatttgtttgcttatctcgctgttgctagatgttgtgcgaaacgttcgtttaattcggctgctagttcctcactagggctaatgataacaatcgtatcgtgacccgccagcgtcccgacaacttctgggtaccccaaatcatcgattaaggctgctaataaattcccgttacttgggagcgtcttaattacgtttaacatttgcacttgtgtaatggacaaagccacttcacgcagtttatcttttaatttctgagtttgggtgcgttcgtcatcgtgaaaaatcgtatagcggagctcaccgttcacatcccgtgccttaacgatttgcatctcccgaatatcacgtgaaatggtcgcttgcgttgcatcaatcccatcttgtttcaacgttgctaataaatcctcttgcgtcgaaacaacttgctgattaatgatttgttcgattcgtgcttggcgatctccttttttcacgactgccacccctttttaccttaattggctctattataccagtttttatcaaaattcgatagacagcgctttatataattcaaaaaagcgcatgttcataacttttttacccacaaaaaaagagcgccgattactcgtgtgcccttttaagattaagctttccgtgcttttcgtactttaaatgtggttaaaattgcgaccgcaacagcaacccctgccaaaattgagaggaagaacaaaccaatattattggttgcccctaacaccccaacgattgggccaccatgtggcactgcatcggtgattttgaagaccatcccgactgcactagcaactgctgaaccagcaatgatacttgggaaaacttgttttgggttagctgttgcaaatggaatggcgccttcagtaatcccaatcaagcccattaagatagctggaatcccagctgatttttcttcttctgtataaagatcgcgacgaacaaatgttgcaatccccaatgccaatggtggaacagcaacggcacaagcaacagcacccatgatttgtggatgtccagccgtaatcgatgccaccccgaataagaaggccactttattaactgggccacccatatcaatcgcgaccatcgcaccaatcacaacgccaagaatcacactcgtttctggattttgtgaaagggccgttaacatatcttgtagtgccgtcatcaaccatgaaataggtgcgcctaaaacgagaattaaaacggctgagataatcccaacccctaataacggaatgacaaaaattggcatcactggccataaatcttttggtacgggccatgaattaaaccatttaaccaagtaaccagccgcaaaaccaacgataatcgcaccaataaatccagtcccggcttttgtaccaaggatgtctgtattgttggcgaccattgcaccgatcattgcgggtgctaaagctgcacgccccgaaatagcataagcgatataaccagcgagaattggaatcattaaggtaaaaccaatcgtcccaatctgattcatactactccaaatggtatgtggtgaaatcaccattcctgctttagtcggatgcccaccaatcgcgattgacaaggcaataaacaacccaccgacaacgacaaacggaatcatatgggaaaccccatttaataattgcttaataattggactttgttcatgactgtcctcttgtttagcttctgttttcggctgattcttgccataaatacctgccgttagtgctttttcaatcagtgtatcagaatctttaatagcttcagcggtcttcgcatatagtactggcttgccattaaaccgttcttccccatcaacggcaacgtctcagcggcaataatcacgaaatcggcatcagccacatctgcggcgcttaattcatcctctacccctgaagcgccttgtgtttcaatcttaacttcatatccgcgagcttgcccggctttttgcagtttttcagctgccatataagtatgggcaatcccaactggacattttgtaatcccaacaaactttttcatcttctaaatcctcctagttaaattcgatttcatcgttaactaacgtgtagagtgccattgcatcatgccgattttgcttcaaattatgaataaaagcgtcatccatcaacttgcgcgcaaacttcgacaacacttttaaatgcgtcttattagggtcatcgagcggcataattagggcaatcgcgatttcaactggtgcgtcatctaatgcttcccaatcaacaccagtttcaaacgtgacaattccgacaactggttgagttaatcccgccactttcgcgtgtggaatcgccaccccattcccaaaaccagttgtgctctcagcttcacgcgcattgaatcccgcggttaatgcaacccgatctaacccattcttatcagcaaataattgcgctagtgttgctaatgccgtcggtttatcatccccaacaacgatatctgtaaaaatattttcaacatcaaattctttcatctggtaacactccattctaatttttctgattcaattgtgccaagatggcgagggcagccgtcccatcagatgcttgtgcgacttgctttaaaagacggggggtttcaatcaattggtctaaatcatgataaatcgcccgcatttggccatgaacagtttcgttcaaggccataaagaagacgagctgcactttgtcgttgtgttgccaattaatactttggggtgcaatcagcaacccaatggctggcttggtaattaattgtgaatccgcatgcggcaaagctactcgaccaagtgccgtacttgctaaagcttctcgggccagcgctgcctggacaaccgttggctttgcatacccttgatcaatgagccgctgacaaattaattcaattgcgccttgatccgttaactgctcttgcgtgacaattgtcagttcgggttgcaataaagctactaagtgattggtaggcgtcggttgttcagtaatcatctggcgaatgattccaatatcatgccgatttaacaaaggactgacttcaatcaccggcactgacaaacctttaatcgcaatcgtactgatgactagcgattccttaatcggggttgcaagtagttctcccaaggcaataatacgagtaatccgtaattcttgagcaaacgttttggccaaccgttgccctaataattgcgatttcccaatgccactactacaaaccaccacaacactcaagcgtgcatcttctgaatgtcgttcaaaaaaaggttcaaagtgtaaactaataaaggctaattcgtcctcattcatttgaatctgatactgattttcaagcaccggctttagtaatactgcttgatcaaaggcttgcggaaaattctggcgaatttcatcagtatatgggttattaatactcaatcccattgcaagccggcgaagtgccgaacttaaatgaaccgccaacccctgaattaattcctcatcaactgctaattgagcaagctgttgccgtaatagttgtggcagcccgactgattgccgcaactcggtctggatagtttgaacagatgtatccttcgattggaccgttactaaatgacggttgagatattcctgttcaaaatccggaattgtcaattcaaatcgccgttctaaaatctgtactaacagctgtgtttcggcaatgaacggtgtcaccactggttgggctccattgcttccaccagttggtgctggcatcatcagatgaatcgctaacgactgaaactcgtaatcagtaaatgatagcgtacttttttcaattaattccgttaaagctgtgagtatgtttttaatcaaggctggttcaaacagttgattcagattatccggtaattgaacatgacgcactaactgtccatttaactctttagcctcagtccgttttccccaatactgactgattaactccaccgttgcttgccgcttttgatgctcagaaccgattaaggataaaccggtatgcgtgattgccaattgaagaccgaattgcgcgagtttttgctttacctttttcaaatcattctcgactgtactccgactcacgtatagggtattagaaagttgttgaatcgtaatcgatgctgaacctaataataatttagccagaatgcaatgacagcgttcttccttggattggggacgatcattggcctttttttcaagatgattggctaatgtcgcgacatccccggtaaaataaataccgtcattcggttttcgaacgagtttcacattaaagggctctttcgatatcattcaaggtggttgcaatggtgcgctctgaaagctgtaactgtgcggcaatgtcgacatagtacgttttatgctgggccaaactatattgaataatagcgtgttctcgtttgttcatgcttatcgcaactcctcgtttcaatccctctacgctatctatagtctaatgtttatgtatccgcttgcaaacgtaattatttgcaagattattctggtaattattgcgcaatgctccataagcttttcttaatcaaccggttatgctggggattgtttatttagttgctagcctaatccaatccattaccttatccggtcaatttatcgcacaaaaaaagagcatcttaattaaaagatgctcttactagatatgttttgctcgccatattcaatggtgaccccctaagtcaaaagactacaaacataatcctttaacgcgggctgttaaacctcaaaatgtgccgacacgaacatattcaattattttttgatattgtagaatgagttgatacctttgtatgaagctgtatcgcctaattgttcttcaatacgcattaattggttgtacttagctaaacgatcagtacggctcattgaacctgtcttgatttggccagcgtttgtagcaacaactaagtcagcgattgttgtatcttcagtttcacctgaacgatgtgaaacaacagctgtgtagccagcttctttagccatttcgattgcttctaatgattctgttaatgtaccgatttggttaactttaacaagaattgagttagcagcgcccatcttgatacccttacgtaggtaatcagtgtttgttacgaagaagtcatcaccaacaagttgaactttttcgccaagttctttagtgattgatgcccagtcttcccagttgttttcatcgataggatcttcgattgaaatgattgggtatttagcaactaagccttcaaggtatttaacgaattcaggtgttgtgaattcttccccagttgaccaacgtaatttgtatgtcttgtcttcgttgttccataattctgatgaagcaacgtcgatagcgattgaaatatcttcgcctggtttgtaaccagctttttcaatagctttgatcaagtattgtaaaggttcttcgttgtttgcgaagtcaggtgcgaaaccaccttcatcaccaacagaagtaactttaccgtcagctgataaaagactcttcaatgcttggaaagtttctgaacccatacggatagcttcgcgtacagatttagcaccaacaggcataatcatgaattcttggaaatcaactttgttatctgagtgagcaccaccgttgataacgttcatcattggtgttggtaatacgtgagcgttagggccgccaagatattcgtacaatggtaagcctaattcgtcagcagcagcacgtgcagcagctaatgaaatacctaagattgcgttagcgcctaatttacctttgttttctgtaccatctaattgaatcatagcagcatcgataccgcgttgatctgtagcgtcgaaaccaatgatttcttttgcaagaggaccattaacgttttcaacagcttttaaaacacctttgccaccaaaacgtgatttgtcgccgtcacgtaattcaacagcttcatgttcaccagttgaagcacctgaaggaacgattgcgcgaccaaagccgccatcttctgtgtaaacttcaacttcgacagtaggattgccacgtgagtctaaaacttcgcgacctaaaatatcagtaataattgacatgtaattttctccttttttggctaatgctaagcattagcgcttttttggatgtcaggcaaagcctacatctattttagctaattttacgccattcgtaaacaggaatgcgttaaaaattagtcgttaaagtgaactaagtctaagaatgaagcaggttccatacttgcgccaccaactaaaccaccgtcgatgtcttctttgcccatgatttctttaacatttgcaggtttaactgaaccaccgtattggatacgaactttgtcagcaactgtttggtcgtataacttagcaactgtttgacgaacaacagcacagatttcttgtgcttggtcagcagaagcagttttaccagtaccgattgcccagattggttcgtaagcaatgaccattgagctaacttggtcagctgaaaggcctttaagaccttctgttacttggtttgaaacccattcttcagctttgccagcttcacgtgtttcaagtgattcgccacaacagaagataggtgtcatgttgtttttgaagattgcgtgtgcttttttattgatatcttcatcagtttcgtggaagtaatcacgacgttctgaatgaccgatgatgacataatcaacacccatttcattcaatgtttttggtgaagtttcgccagtgaatgcaccagcatcttcgaagtaacagttttcagcagcaacttttaagtctgtgcctttagctgcttctaataaagcaggtaagtcaacagcaggtgcaccgataactgattctgtttgatcaaacttaggtaagttggctttgatagcattcacgaactcagttgtttgagttgggttcatgttcattttccagttaccagcaatgattggtttacgcatgagaaaatctccttttaattttaaattatttgtctgaaatagcagcgataccaggtaatgtcttaccttctaggtattcaagtgatgcgccaccaccagtagaaatatgggttaacttgtcgccaacgcctaatttcttaactgcggctgttgaatcgccaccaccgacgattgttgtagcgcctgataagttacctaagaattcgccgattgccaatgtccctttagcaaagttgtccatttcaaacacacccatagggccgttccaaacaacagtcttagcatctttaaggacgttttcgaagtcagcaattgctttaggtccgatatctaatgccatgtagccatcaggaatgttaccttcaacaatttctgtcttagcatcgtttgagaatgcgtctgcaacaacgttatctacaggcaatactaatttgtcgccagctttttcgattaattctttagccaattcgatcttatcttcttcaactaatgagttaccaattgataaacctttagcagcgtagaaagtataagtcataccaccaccgacaatgactttgtcagctttagctaataaatgttcgataacaccgattttgtcagaaacctttgcgccacctaagatagcaacaaatggacgttctggagcgtcaactgcttcgcccaagaatttgatttctttttctaataagtaaccagcaactgcaggtttgttattagctttcatagctgttgcaatcccaacgtttgatgcgtgagcacggtgagctgtaccgaaagcgtcgtttacgaacatgtcgcctaatgatgcccaatattcgcccaacttaggatcgtttttactttcgcgtttgccaaagtcgttgtcgatgtcttggaaacgagtgttttccataaccaatacttgaccatcagtcatcgcattgattgcatcttctaatgctttgccttcgtttgaagcaacgaaagcaacgtctttgtttaataattcgccaagacgtgcagcaactggtttcaatgtcaattctttcttatcttcgtcactcttgatacggcccaagtgagaaagtaagattgccttgccaccattgtcgatgatgtattggattgttggtaaagcagctacgatccggttatcgtcaccgataacgccgcctttgattggtacattaaagtcaacacgtactaagacttttttgcctttaatatcttttaaatctgcaactgtttgttttgccatgtggacaaacctcctagattttcataaaaaaaggcggaaggagtttacctcctcccgccttataaaatgctatcgcattcctaagttcacaaaagtgaaattagattaagctagcaaatttttctaatgtacggatcatttgagcagtaaagcctgattcgttgtcataccaagcaacaactttgacaacttggcctgcgccaccgccaacgatttgtgtttgagtaggatcgaatactgaaccgaattctgtaccaatgatatctgatgaaacgatttgatcatcgttgtaaccaaatgattggttgccttctgtaactttcttaacagcagcgttgatttcgtcagctgtaacttctttgtcaagagttgcaactaattctgtcaatgaaccagtgataactgggacacgttgtgcgtggccgtcaagtttacccttcaagtcaggaacaactaagccaagagctttagcagcaccagttgaatgagggatgatgttagcagcagcagcacgtgcagcacgtacgttaccaccacgatcaggaccatcttgtaatttttgtgtagctgtgtaagcatggattgttgtcattgtaccagctttgataccgaaagcatcgttaactgctttagctaaaggtgctaaacagtttgtagtacatgaagctgctgagatgatgttatcgtcagctgtgattgtgtcatcattaacaccgtaaacaactgtcttaacagcaccagcaggagctgagataagaacttttttagcaccagcatcgatatgagcttgtgatttttcttctgatgtgtagaaaccagtactttcaagaactaagtcaacaccatcattcttaacccaaggaatattacgtgcatctgattcagcataaactggaatgttcttgccatcgataacgatgctgttttctgtagctgatacttcgtggttgaattgaccatgagctgtatcatactttaataagtgtgctaacatgtctggtgatgttaaatcattgatagcaacaacttccaatacatcactgtttgttgcgtaaatacgacgtaaagctaaacgaccaatacgtccgaaaccattaatccctacttttgtagtcataatagaatttcctcctttaggaaatgaaaaattttttattttaaagggttgccccttgtaaaatcgagtttgcggcaccttcatccgtgattaaccacgtctgtttaggtgcaaggtgcatgtacgcttggattgcttgggctttagaagcaccacttgcaaccgccagtacacacggaatattcaataagtcacgaatctgtaatccgattcgcggaatcttgtacacgacttcgccttgtgcattgaagaagtaaccaaaggcttcacccaccgcatgcttttctttaagcatcttgatggtttcaatcggcatctcacgacgttcagccatcgcaatggcttcaccaatactgtgtaaaacaccccggcttcgttcaatcagttttaacacttcttgaacacttggttcttctaacaaaggcgcgtacgtcttctcactcacctgttcaggcacatacaatgcccgatgcttaccacctgtctgcttagccatttcggcacagactgcattggcctgaatatcaacactttcaccaattccccctcgagctggcacaaagattagattgcgctgtttcgatagatcagttgaaagttcatgagctgcttcagccatcgtcgttccgcccatcactgccacaatactttgcccttgtggtaataataattgtaacgtactattgactaatttgcccatttcggtgaggacttttggttgttcatcactattgccagaaacaatcaagcaatgttcaatgcctaagacttgactcaactgacgttcagtctgatgtaaccctaagaattgatccattacttgtcttaactgatcgagggtttcattccccttcacggttaaaaccatacctgatttagacgaattaagcaaaccttgtgctttcagaaaatccgtctcagttctaattactcgctcgctcatcttcagttgttccgcaagcgttcgtcggccaactggcgcgagccaatcgatatgttgtaacacctggtaacgtttcttaatgataccgacgaaatctggcgcaaccgcttctattgcagataattcatcgcgcaattgctatcgcctactttccgtgggacataaaatgtccatctgtgtcattagtcgacccatggttggcaaaaaataaaaggtaacttactaaaactagtaacttatccttttgaacaagaccattataacaagtgcagaaaacagatgcaatgctttggggttgataaatacgttttctttccgaatattttttaaacgttgatttatcgcgatttatcaaaatttacacttgaaatttccgcttaactccgctaatataatatattgtactattgagtacgcggaatgcgtcgctagtgtaatggatagcacccaagattccggttcttgagatccgggttcgactcccgggtgacgcataatcattaaaagataggttggtatagacgtgcttaggcattgatatatcagcctttttcttttctctaaatagattgttattcacagtgaatacgtcaaaccgtattcaaaaccgtattcacgtattcagcaaaaatcacgtacggggcatatacatagcttacagcaggcggtcatattaatggccgttttttaatttgagctaacttcattaaacaacggcctatattaaacatagaccgtcaaggatcatactagcaactactagcattagtttctgtcgtaaatcgcgactgtattcattagataagggggtgtccccagttttggggatatgtttcaaacgagcccaattttggcttggttgtattttttaatctagattatatttaggggtaacgtttcgttacgccattatgtttctatccaaaaacacttgctcaaacttgagccaatctatattctaagttaataccgaacggacttttccgctaagttgatccatgaggaggctaagcgcatcccactggaaacatatgtccaaaattggccagatctaaaattaattagggcttaattttcagccatactaccccaccctcacacgtatataacgcatctctgcggagtcttgaccccttcccgttgtttgtttccccaagggattagcaaatcattttaaaggggggcagatatgcttatcttactcacggaaaaggtctgtccaattttggaccgaccttttttagcccatcaggacgatacggtatagtagcttgtttcatgtccgccaagttgtcggatatataaaatccatcacatacaccaccactctaattcaggagagtggttctaaactaccgtttcggtacctcagattgcttccatgcaattagccgaaaccaaaaatggattgggcaacatctcgttaaaatcaacggtatctaaagttaattagcatgggatttttccgttgtactgtttctataattggctaagtatctgacgcaccatatcagtgcattagatgctgttgtaatatactaactcatctttaaggagtcatcaattcggtaactccttcttttcgtgcttgcgacaagagaaatgctgaagtggttcctagatattcggccacttcctgaagcgcgtcagcgcctggcgttgactcgtcccacttactaatcttgcctggaacaaaattcagatcgcgttcgattcgataatatgttcacacgcgtctaccagctgattgcctagattatctaccacaataacgtcacgatggtaggcttatttgttataccttcaagtacgatattcagacaacacaccagattaaacgccgcaactaataaaacaacaaaaaagatctcccacacgaggagatctccaaaggatagaaactatccttcaacaccatttgacaaacttccgttttatttcaaatatagattacccacgaatctccgcttcatcagaaacccgcttaaatttaatatctgtatcaactgctttaaagtgtttctcaccagccagaatcttagcccgttcatgaggacgtaactgttcaaaacttgtatcacctttcgtttcaacgatgaagtataggtgttgctcatcatcttcttcatatagcaatgcccagtctggattgtaaggcccaagcggtgtgcgaatcttgaaccaatctggcagcttaatgtagaacttaacattgtcatccatttcagccttacgagcaaaatccttttcaatgcttgaatcagttacaacatagtcataaacagtcttttgtttactttcatcaactttaaccgaatttcctttttcaccgaggtaagcattcaaggtttcagtgctaaacagcgtctgttcgtattcatcatttgtacgagtatattcaataccatccacaatcaattgattcttgattgcgttgataatcttcgcagcctgattcatatatgacaatggattgttcttaaaactatccagattgttgactgactgcaaaattgcgacgattgtcttgcgagtcaaacttgtttcattttgcaagaaagtaatgatatctggcaatttgtacgcaccactcgttgttgcacgaacactgctttcgctagattcatcagccttcacaccggcttgactcatctcaaccatccccttcttgtaaaggtaggtccccttgcgagtctggatggaatcaactccgtcaaatgattcatttccttttgcagcaaattcgattaatttgtttgaatcaaaatgaatcttataagtcgtcttgtatttgattttgttccaaagttctaaaaagtcatctgctaaggcttcttttacaaccttgacttcgactttatccttgacatctttgatatcaagactcttaactttagatttagcagcaaccaaaatctgtggcacaacatcaataaattcttccggtacttcaatttcctgatcagtaatcgcttgtttcaacttatcggttgctcgcccggatgaattaataaattcttcctgtttgaggtagttgaacaattgctcagatttttctttgccaagaatttccatttcttccgtaacttcatcgtaatgcgtaataatcgtcgcaaagctatctttattaaatacaccaaagataacaccatcttcttcgtattctttttgaagaccttcagcaaaatccttatagctttcatttgccataacagtcagcgtgttaacagcaaatccagggacacgttcaccatcttcgttaaccgcaatacgcaggccacgaccaattttctgacgtttgttaattgtatcctttgtttcaatcaaagtggcaatctggaatacattcgggttgtcccaaccttccttcaaagctgaatgagagaaaatgaagcgaattttattagccttcgctgtatgatgcttctcttcatcatagaaagtcagtaagccttccttgttcttcataatcatctcgtaggtagattcatcggcctgagtatcacccttggtattttttaacttacctttattatcagctgagaaataaccatcatgaacttcagagacaggtatattaacatcattcaaatccttgtacttagataaatgaattaatcgttcgtactcttcttcaaaaatacgcgcataacggccaaggctaggatttccctcttcgtcataaacgcggtagttttctaccttgtctaagaagaacaagctcaaaactttaatccgctgtccagcttttttaaaccgcaactctttgtttaagtgttcttcaatcgtcttagaaatctgagcacgttttattgcttcatcttctaatgtagctgactcaagcgtgattttttcaggattacccgagaaagtaactgattcaaatccaggtgtagcatcaatgtcttgaatgaacccaacttcatcatacgcctgaagcttggttttactaaacatatcgttatcggctttaaagttcatagttattttatcagcgtcattacgtgtctttttataaacttcaatcttggcactgataccgttcttaccagtttttacgtcaatcaatttcaaatgagcacggttaccatcttcgtccatctcgatgccggctacctcaatctgcttaacaagttgattgtcgtaagcatcaaccgcaccaagttgataaatcttcggataagtattatctcggtgagtggctgaataacggaagcccgctgacggatctaaactcttcaaagcatctttagccaagtcagtattatcaacagactgtggttcatcaataataactatcggccgtgtttcagcaatcaggtcaattggtcgtgcaccagaaagttggtcattttcacggttcatgacgtttgtatctttgttgaaagattgaatggtcgtaaccatgatatcaatcgtatttgccgatgaaaatgaacgaacacggtcaagtttgctgctatcaaacatgaataaatcataaaccacaccgttgtattgatttttgaaatagtcttttgtaatctcgaaggatttaagtaccccttccttaatcgcaatacttggcactacaatcacgaatttcaaaaatccgtattgtttgtttaattcaagaatcgttttcaagtaaacaaaagtcttaccagtccctgtttccatctcaatattgaactgcgggaaagctttgttatttccaaacagattgtcacttggcacgattccattcagaatttgagttttgttgatgttcttcaacatctgttcttcattaagaatcacacggttaccaacaccaataccatcactggcaaacaatgttccttgcgggacatcatttgttattgtaaaatttgattctttaatcgtctgaccttcaaacacacgcaccgcactgttaacggcatccgtttgatagtcgagcgtatcaaattgtattttcaagagtctttacctcctttgctttaaatacttaaaatgtcgttgtactggatgccacttgcattaagctgctcgatagtgtttaacttctcactatcattgatgaatttttcatcctgcaaaacaaccaccgagttttcagcttcttcgtcagcaatttgcttcataatatgtccagccacttcactcgtaatcttgtctccaagcactacaaacatcgcgccaaatgctatatcgtaaacgaccgcatccccgacttttatttccctaattgggtaagtcagatcaagaccttgcttcagcatgatttcgtagacaacatcaattgattttgaaccttcctcaaagttgttagcgagtaattcaaactgctcattcaagtcttttggtttggcattccatttcttgatatttgacttagaaagttcaaagactttgaaaccgggatcgaatgtatcctcatttacattttcaccctttgctattttttcaccagcgagtttgattctttcctcagcaatttctgttaaaacgtgtggcctacctaatttatcaagtacgtctattgctgtttccaaggttttaactgcatccttttgtgccacctttaaagcatcatcaagattttctggaagagataccaaaatatacttccttaactgtccagatgccgtagtttccattacggattcggctgtacttcctgagccagagaaaaagtccattattatatcttcatcttctgtataccaatcaatgaatgttttcatcattcctactggttttggagaatcaaatggtgagtctggaactccaaataattcagctaacttcgtagaaacgggaccttgagaaccccaacgttgagtggtttgaggtgattctgctgaacgtcgttttacaacttttacctttcccgcagagttaagataaaattcaacaatctcttgcccctttgtatcaaccaatccatctctatccccatagaagtactgctgcatttgattaatttgtgtatatgcggcccggatggttgcatcttctgtagttttcccattttcagcttttaatattcctgaaacaacctcaatagattctactccatcagtttttcccactatttctttcccatcaggagcatcaaatcttgtcccttttggaaaagtaaattctcctagagagtgacgtccagatgccttcttcattgcacccgcttcaaacaattcattgttctctgaatttgcatgtccaatctcatttacatttttggcatacactactacatactcatgatagactttaaagcttccggcttgagcgctatgatttttatcccaaatgagagttgcaaggtgattcgtttcgccgaacaactcatccataacattcagcaaatttgaaacttcatcgtcagatatacttataaatattagcccatcatctgtaagtaaattcctacctaatttcaaccttgggtaaatcatatctagccagtcagtgtggaatcttccgctcgtttcactgttatgagaatacttatgcccatcagaatcgacttgaccagtttcctccagatagttcttaatcgtatcatgaaaattatcttggtagacaaaatcatggcctgtattgtagggtggatccaaatatatgagtttcactttattcgcataagatttctgcaaaatcttcaacacctcaagattatctccttcgatataaagattttgcgtttcatcccagttctttgattttgctttatttggcttcagtgttgccacagtgggctgctgcgccagctgcatcgcttgcttcttaccgttccaagtgaagctataacgttctggtgccgtttcaacttcatccccaagaatcaagcgcaatttatcaaagtcgattttcttctcagttagtacctcaggaaataattccttcagtttttcaatgttttgttcagtgatatcaagcgaatgactagagacttcctctaatcgctcgttcgttcgttcgttcgtcataggctggtgttccttccttaacttatcaagcatatttactgattaattttgcttgaaagttcatcttttaattttttcagcttcatctgcatatcaattttgcgatttaactgacgatcctttttaatttggccacgcaaatcttcaatctgtttctttaatgcatcaagctggtctttttcttcaccagtgatattgccaactgcttcaccatattgtgacttagccgtagctgtcgcaatctcatcccgaagtccatcataaaaagttttcagattctgccgtggtaaatcaatcagtgatatttgctgcaacacttcttccaagttttcatcttgataaaccggggatggatacacattcaccaacttcaaaaagcctgttgataacttctcaaaacgacccgtgtagatcgtaaaactatccggttcatcggtgaggataactaatggatatggaatcaggtgtgctaacattttatagattttagtcgagtcacctttatccttggttttcacataaagaaactgaatttcttgataaagttccttgtcgtcctcatacacagcaatatgtgtattgtcagttttcagacttgccaacatataaatgctttggacggaatcttttaagaattgcttgtccgccgtatttttcatatgtggatagatttgcgtttttggtagattttgattgatgattgtagcacttggaaatttccaccatttgattatgtctttcgtttccaattcgctcacctacctaataatcaaaaatgaaattaactcaacatcatctaaatcatccaatagttcagtttggacgctagtaccaccaggtgaaaacaatgaacccatccctacttcatcttgcttacctcgaattgcttcaatcgctttactcaagatttcagaataggcactcatgtccttaccaccattcgtttcctcataaaactcatctacaagtggttggttgaccgtctttttaccgaccgtcagctttttaaagaagtccaacacttgcttggcgtacatgtagtttattttgactgttccatccattcgcatataaacaacaatgtacggcaagatactgttttcttgtcccaggtcattcgtctgctgcttcaaggtcaatatgacacccggttcagcttcagggaagttggttgtatccgtaattgcatacatgcctagcggcgcttcattcaacaacttctcatgctctttcaaagcattctgcaagtctgctttgaagtcattgaaggtcatgtcggtaatggaaattgccccattgacgtcttccaaatcaatgacttgagtttggagttgttccaactgtttcttacggtatttcaagtcgttcatttctttattagacttgatattcaataagtcatcttcaccggttgctgccgtatttaacatgatcatacgtcccttgacacgttgttccagattcagataagtatccaagtccacatttggccagaagtttactagttgaatctgtttattacgtgagccaatacggtcaatacgcccgaaacgttgaatgacacgcactggattccagtgaatatcgtagttaatcaagtaatctgcatcctgcaagttttgcccttcagagatggtatccgttgcaatcaacaaatcaatttcttcggttgcgttcggattgatctggtcacgcccttttgatatcggtgagaagttcgtcaagatatcactcatatcattgacggccacacctttcatggttgttttgttcggtgtagaaccacccgtcaccaacgcagaattcagaccataaagtctttttactttgtcagctaagttctcatagagatagttagccgtatctgcaaaggcagtaaagatgattactttcttgttgttgccattaattggatgctcatacttatgcttgagaattttctccaagtccatcaacttatcatctttgtccggtgttactcgatgcgtgacggtttgcaattctttcaacgtttccagatcttcattaagagcttgggaccacttcaccaagtccatatcaccaatcaatattttagtttttgtccccactgcctgttcgtcaaaggcactttccaaatcctcatcatcaaaatcagtgatacttggcatttccacgttacccgcttgatgctctttgattttttcaaggatatcttcaatcccgccaaccattcggtcaagggttaatccaaacgaataaatggaactttccagtcgtttgaacaaattggcacgaatcaatttagccaaggcttgttcacggtcaacttgcctgaatgacgacttcccttcttttaccttggtgtcatacaattcttcgtagcgctttcttttagtcgagagcacatactgaagtggttggtacattgccatgttcaagtaaccgattgaatcataaacatcctgtaagtcagggaactgccctgatgcatcaatttttggtttcactgtcattggcttcaagcgttcagggaaatctcccaatgaagtcgtatcataatatttttcaatgtgtttccgactacgagcaatcgttaacatacccagtaacttgaaataatccggattgaccttatcaagaaagctttgagtcgtccgttcagattcatccagttccatccattgattaaaagcttgttgtgctaaacgcagtgtcgtgtcaatatcatcaacaccatacttcgccaacgcgtccgttttgccttcagtgatgaaaccaatctgatttttcaagtcattcattcggttgttgattggtgtagctgaaagcatcaatacttttgtcttacgtcccttttgaatgatatcttccatcaagcgttgataacgtgttttggtttcacgattgacgctggtatcgttattacggaagttgtgggattcatcaatgacaaccaaatcaaaatcagaccacagaaaagtatccagcttgattccgtcactttcacctttataacggctaaggtcagtgtggttcaaaacagtgtagttaaagtagtcatccactaaaacatttcttacatcaggtcgtgtataaagtgtccagttatcccgtagtcgttttggagcgagaacgagcactcgtttacgttgcaactcaaaatatttgataacggccaaggctgagaaagttttacctaaaccaactgaatcagctagaatcgcaccgttgtatttttcaagcttacgaattaagcccatcacaccatctttttgaaattggtaaagcttattccaaattactgaatccttgaacccagaaccttctggcgcaatgtcttgctcatccaattcactcaacttgtcatgaaaaatatggtaaagcgatacaaaataaatccattcaggtggattttcttgataaatggttctgactttttcaagcaccttgtctgttacttcttttgactttttagggtcattccagacagcgtcaaagtcagcttttaaaccagctaagtgattaggttctccaataattcccgtcattgaagaaacgttatttgactctgtaagtcctaagccatctgaagtaaatttgaacattgaaggaactaccacattaccttcaatatctgcttcattttcaatcagtagttcatccaaagcattttgatttggtcccagctgatgaacctttactttttcctcaatcaaccttgccgtttcacgagcaataaaagccgtgttcattttatttctgagcttaatttcatacttatttccagaaatatcttcttcactttgcgcaatttcataccgctttaaaaaactagtttcttccttctcaaagaaagatttcgtcagaaccaaacacaactcctttgaacgcttgatttccttttgtaatgcgtgaaaagcaaaaattgaaaatgcagcagtttgaatgctgattttcgaatgtttcgtcaccttttcactgattaaattttctagggtgttatcccccttgttatcaattaattttaattccatgagcgtctcccaaggctataattttaattctttattctgtgctgtattaagcagctaccacttcacaaatatccccaacatcacaattcagtgcgatgcaaattttagctagtgtctcagttgtcactgtgccactattatttaatttattgatggtgtattgactaagatcagccagttcagctaaatctttctttgacatgtctcggtcaattaataacttccacaattttttatagctcatcatcttatcacctattttctctacaatctgatatgccgataataaatatattatatcacgattgatatgaaattttacacaaaaatatagcgaacgcttaatcattttacgattgattagattttgataaatatttgtaggaacgtaaattttagggggtgtttaggggtgtcatagggtgttaattcaaaacctaggggtgttatatttttaccccccttggaaattatgcctgtatctcattgatgaaattcatcgtaaaataaaaggtagattgtaaaattaatccgaacgctgttcggacaaaaaagattagcttcctttaaaatggtgtttaccacaaacccatcttttaggagctgatcttttgatcgtttgcgggacgtagctagccgcagaagtatggtttgaaaagcacgttaaagcccctctaatccacaagattagagggctttttttgttggagtggataggtgggagatttttgaaaaattctgttataatggcggtaataaattaggacggaaggtgagttgcatggatgacaaagacaaattagaacttgaaattgcacgccttaagatggaaaatgagaatttacggttgaaagctgaggttgaacagcggaagaataataagtactggttgtgggcattagtgccaattgtcgcgattcttgctggcaacatgacctcattttcacgtatgttcatgcatttttgtagatagttcacgatagattgcatagaaataggcgttaagcagattatgaaaactgcttaacgcctattttttattggcgactgtgacggtagccgtaactgaagtaaattgttaggccaatcaccaaccagattaagaagacaatccaagttgttagttgtaactgggtcatgagtagtaagcataagccgcatgaaagtaaaggaatccatgggaatagtggcactttaaacccttgtggcaattcattataaaatggtaacttgcgcaggaagatcacaccgagagaaacagttgcaaaggcgaataacgtgccaatgttgaccaattcagcaatcttatcaagtggcactaccattgcgacgatgcttgtgacgatggcgaaaatccatgtattcgcaactggcacatgtgtttttgaactgactttggcaaaaacgggtggcaatagcccatcgcgactaatggcgaagatcagacgtgttccgccgtaggtcataacgagtaggacagttgtcataccggcaactgctcccagggcaacaatcccagcaacccagttttgatgcatcaattgaagcgcaaaagcaacggggtcaccaacgttgagttttgtatagtgcacgacgccaacgaggacggtggcaactgcggcatacaataatgaagcaatcaataatgaagcgataatcccgattggcatatcacgttgcggattgacaacttcttctgatgcggttgaaacggcatcaaagccgatgtaggcgtaaaatgctaatgctgccccagaaagaatgccaccagcaccaaatggtaagaacggtttgaagttggctggtttcacatagaaaatggcaacgccaaggaaaattacgatgacagcgactttcacaccaaccataatcgtattaatccgtgttgattcgcgtaagccatttgatagtaagaacccaatcaataacgtaattaaaccggcaattaaattaataccaccagggtggccaggcgtccatgcagtcgataagaaggtaggtaagtgtaatccaaagccagcaattagattttggaagtaggctgaccaactgacggccactgaggcgactgcgaagagatattcggaaataagtgcccaacctagaatccacgcgattaattcaccgaagacggtgtagacgtatgtgtaggcactaccggccaagggaattgtagaagcgaattctgaataacaaagggcagccattgcgcagacgactgcagcgagcaggtaagacagcatcgcaccgggtccagcatatttagcggcgataatccctggtgtgataaaaataccggcgccgacgactgcaccaacccccatggcggttaaaccaaaggcggttaaatggcgttctagtgtactatttttaaattggttcacgtcgatttgttttttggcaaagagtgaatgttgtgtcattagtaactcctttttaagtgatatgattctaattttaatcggtctactgagaagcgtcaagataaaaaaagcgccatgacagtgattgagccgttatggcgcggattagttaagtgattaaattaagccccagtggcgtaaaccctcaataatgccaccttcagtattcttagaagtaatgtattttgccttggctttagcttccggaataccattgcccataacggtgggatagtctacgaagtcgagcattggtaagtcgtttgtaccatcgccaaacgcataagttgggatgcccattaagttttgtgagcgaatcaattctttaataccggtttgttttgaacaatctttttcaaccgtatcaattgagttcggtgtgttgcggtagaatgttaagtcggtacttagtgtttctgtataggccttgtcattgtcgtttgtgagaatcaacatcatgtagactgaatgattcaagtaatagtctggatcaacttcggggacgggggcgttgacaaacttgtaggcatctttgccgggttgagttacagccgtaatccggattgcttcttcattataaaaagcgatggcttcgtcagcagcattagcaattgcgacggttttttcaatcacgggcgttggaatagtgcctttataaacaggttgaccttcatattgaatgaagctcccatttaaacaaatgaatgaatcgatgccggtttttgcaagtgcatcttgaatttcaagcggtgagcgaccggtcgcaatgattggtaagtagttgttggcgcgtaattggcggagtgcaatcgcaacagctgcatctacttcagaatgttcgttgtaaagtgtaccgtcaagatcgaaaaatactagtcctttataagtcaaaatggggcctcctaaataatgatatctgcttaacatgctatcatgcttagcgataccatgcaaacgggaaccgtgatgcgtttgattttcatcacttcttcatatattattcatccgtaattggtttatctactgtataatatagacatagcaacgtaaaaagagaaggaattctaatgaaaattttaatggtagaagataacaaatccgtatcagaaatgatgagtatgtttttccaaaaagaagcttgggatgcccatttcgcttacgacggcaatgaagcagtggaagcctttagtgtcgatccagagagttgggacattatcacgcttgatttaaatttaccgggtttagacggaatgcaagtcgcccaaaaaatccgcgagttgtcgaagacagtaccaattattatgttgacggcgcgcgattctgaaagtgatcaagtgcttggccttgaactcggtgctgatgattatgtgacaaaaccctttagtccaatcacactgattgcacggattaaagccttacatcgccgtgctgagttgattgatgaacaagtcgaagcagctgaagaaaacttacaacaagcggctgaaaattcagattttgatgtacaaacaacacactttaagttgagttctaaaacgcgtgagacttatttattggacaaaccaattttagatttaacgccaaaagaattcgatttattgaagacgttagctaaaaatccccgtcaagttttctcacgggaacaattattagaacttgtgtgggattaccaatacttcggtgacgaacgaacagttgatgcgcatatcaagaagttacgtcaaaagattgaaaaagtaggaccacaagtgattcagaccgtttggggtgtcggttataaatttgatgattcagacgcagcgcgcgaatgaagcttatttatcaatggatgttggcatttttcggcgtcattatgacgaccattattattgtggggattgcgtttacgcaatattcgacaaggaccgcttatgagagcacctgggatcaactagaaggttacgcggatgtgattgaacgtgaagctttcaaacaggggtctcaagcggccttgtcgacccaattcattattgatagtcaacaaatcctttcccaacaacacgttgggtttaatttctttaacgccgaaaacgagatggtgtatcctaccccggatcctaaagtttcggtcaagaaacaatattggaaacatttaaagaatggccagattcaacggctgagcttaagtcgtgattcgcaccaagtgaataacaataagcaagaacagttagtggtcttcaaacccgttttttacaataacaaactgatttacgtgattggggtggcagcaccactacaaaccgttaaatctggtttgacaacgatgcgcaagaacctcttgattgcctttttactatcgacaatcggtgggattctgttgagttacgtcttagcacggtatcaaatttgtcggattaatcgcttacgaaatgcgacccacctagttgctgaaggagattttaatgttcagattaagaatcctggtaaagatgaattggatgatttggccaccgattttaatgagatggtgcattcgttgaatgaatctgaagaggaaattaagcggcaagaagatcgccggcggcaattcatggccgacgctgctcacgaaatgcggacgcctttaacgaccgttaagggtctgttagaagggttgcaatatgatgcgattccagaagagatgcgcgccaagagtatttcattaatgcaaaatgaaaccaaccgactcattcgcttagtcaacgagaacctggattatgaaaagattcggactaaccaaattaaattgaacccgcaaacgtttaatgcggtggaagctatccagaatattcaagagcaactcgagaagaaggcgactgaagccggtgatacgctcatcttggacgcccaagagaatgtcccaatctatgccgactatgaccgttttgtccaagtgatgtttaacatcatgcaaaatgccattcagtttacagaaaatgggcaaattacggtgactgcggaagctggtttccacgaaacaatcttaacgattagcgataccggtatcggaatgacggacgaacaagtcaaaaatatttgggaacggtattacaaagcagatccatcacgtaagaataccaaatatggtgaatctggtttagggttggcgattgtccaccaactcgtccagttacattatgggacgattgaggtccaaagtattcctgaacaagggaccacttttaccttaactttcccagatgaaacgattgtgacaagtgaaagctaaaccaatttaaataggcgtcacgacaaggattaaattgtcgtgacgcctattttttagattaaatatgcaattgcgtttgagctggttgggtttcactgatgatttcgcctgcgtgcattgagagggtaacagcggcgcgcttgttgagagcctcgtagaagttgtcgctatccattagaatcaggtgggcgggtttacccacttcgagaccatattggtcaaggacgtgcattgcacgagcaccattgtaagtaatgaagcgataggcattcatgatttcagtatggcccatgatttgggttgccagtaggccactatacaacacatcaagcatgttgccatcgcccattgggtaccatggatcttgaatatcatcttcaccaaaagcgacgtttagcccgttggcagtcagttcttttacgcgcgtcaaaccacggcgcttcggataagtgtcaaaacggccaccgagaaataggttgacaagtgggttggcgatgaagtttaaatccgccatttttaacagccgcatcaatttgtacatataggcatcgttgtaacagcccatggcagttgtgtgtgaagccgtcactttgtctttcatccccgtttcaagggcgagagtcgcgactgtttcaagactacgtgaattgggatcatcaatttcatcggtatgtgcgtcgaatagtaaatcatattcttgagcgagttcaaaagcaaacttcaaggattcgacggcatattcgcgattaaattcgaaatgtggaatagcaccgattgcatcaacccctaattgggcagctttggtcattaatgctttgccatttggaaaagaaagaatcccttcttgaggaaaggctaccagttgcaacgtcatccaatccttgacttcttcgcgaacctcgattaaggctttgagcgcaactaagtctggatcagtcacgtcaacgtgtgagcggacgaattgaatcccatggctggcttgtaatttcagtgcttgaattgcgcggtgtttgacgtcgtcgtgggttaaatcctttttgcgttcggaccaaatccgaatgccatcaaacaaggttccagattcattccattcaggctggccggcggtgagagttgaatcgagatggacgtgaggatcaacaaatggcggtaatgccaattgaccatgtccgtcgatgacttgctcattaggatgcggtattagctgtgcctcaattgctgtaatgatcccgttttcaattctgattgactgcaatgattcttgattctcaatgtgcacgttttgaatgagcattttatccaacctcgctttttttattagtgagtataacaatcatgagttgactttggcaagtaagtttaatacaatgcttataaatataaatccttttaagggcagtccagtgaggctgacaaaggagcggttaacaagtacattagtggacctgctctgtctgggagtaggtctttttttaatgcaattaaccaagtggagggtatcaaaatgacaaagcaacaaacaattcatgcagtatccaaggacgcacgaacgatgggcagttgggatttgttcgcaacttggattggtgcaaatgcgaataacggcacttggtttatcggcggcattattgcggcaactggcttgattcaagggtctacgttgttactagttgttggctgtttatcgtacgtcttgcttgcactggcctcctacatggggtatcaaactggtgtgggggcgatggggctaacgcgggcctcatttggcgtgaagggatccgtcttgccatcgattatcaatgtggtacaattcatcggttgggctgcggtgaatacgtatattgcagcaacttcagtgagcttcatcatcaaggaaatcatgggctggtcaggcaacgatgcagccactaaccggatgagcttgattgttgggattctaattatgtctgtcctgcatttaatcagtatttcgctcggtgaaaaatccgtccgctggattgaacgaattggcatcatcttagtgattatcttagtcacttgggaatcaatcattgtcttcaaaatggtaccgttcaaagacttagtggcgtggcgaccagccagcaacttgcggcttgaatttgggaaggcggtcgatatcctagcagcgtttaaccttgcatgggtaaccgctgctgcggacttcagtcgtttttcaaagaacaagaaagcagccacaggctattcattcttaggcgccaatattggcctgttctggtttgctttcatcgggttaacggcgacaattgccacagcgattacgttaaatcattttgacccgaacaacgcggatccaagcaccattgcggccaaattagggttaggtgttttagcgttattagtgatcgtgattaccagtacgacagctaatgcggtgaatctaatggctgcgggatcggctttaaccaatatttttccgaaatttaaattaacgccggcattgtgggtcgtgacgttattggcaacggtgatgacctttatcccggtctatgttgcctcatttttaaccactttcgaaaccttccttgatagtattgggatgttcttaggacctgaaatcgcagttttcttggtggattacttcattattagacggcggcactacaatgttggtgcgctcaatgaagttgctggaccatactggtacaccaaaggatatcatctgacagccatgattgcatgggtcattggggtggtcagctacttggtcttaaatcaattcgcgattattcacgcttatacgggggcaacgtttatcgcaatggggctgacagcacttgtttattggttaatgattcaaagaaaagaaaagacaatttaagggaactaaaaaaacgtcttaattaaggcgttttttttaatttttaccacagagttcatataattttcatactttagttttacactatctttattaggaggtgggtcatgttcttcattaaatcaattccagctaatattcggtattatttacgccaatctttgttaatctatctcgtggattgcctctttttaggcgtcatgctgattgcgctgagcttgatcagtttagaacgacatgacctcaaccagttgaaaaagcaattagccaactttaacacaactaaagaggggactaaccccctgacacatctggttcaaagtaaagaagtcttactgggacgctatcaatttatcgcggtagtgctgactatcgttatcgcacttgtgattggtattttgacttggcaagcgtttaagaagatgcgtcaggatatcgatactttcactagtgcgaattggtcgcgacatacaattgtcaattattatacgttaacggcgctttgcttactaatcagcgcaagcgtgacagtgattttaggttggttattagtcaattcctactattggcgcggattagagctgattaatcaacagtggctacaaaagccgttgcgaccaatacaaggtccccgagcatttcaaccgttatttaaaaatcatctgactgactttagtagtcattcgttattgaatccgattttgcatgagagcaccaagcagaatttaaccaatcaagtattcgcccaactatgggcaccatttatcagtctaattgcaccagtctacattattggttggtgccaagttactcgctttaggaaaatgagaaaggcgtgattgaaatgctaaataaacaacccttagcacttggacaggtctattttagtcaaccggagatgattcagcagagccttgaatcacctgaacccccatatgtcattgattatgaggcgcctaagattctaccctttatgtccggttgggataacttgttgcttcctaaaaagcagcttgcaccaacgttaaaaatgttgattgaacagcatttaaagcgcagtcggagtttattgggcaccgaattaccgccagtcgatcagttctggattcaattgattcgcggtttagcaagccaccagcaactcgtggtggtcaagcatttcttagatgaacttccaccaacggatgctcgccaattattaaatgatgtcagagcggtagcagcgcagtttcaaattatcgtaatcatgacaacgactcaggaatccgtttttaatagttttcaatcgcaggtgattagctaacgtcaaaaaaacgcaaggacaatatatgttgtccttgcgttttttttgacgattattccgtatcgctagttgctgttgcatcagactcttttttcagggcctttgattttggcacttccgtgaggcttgattgatcacccgctaattctggagcatcggttttaaagagcccaacagtcgattgatcaccattttgcgagaataaactggttgaattagcccctaatttattttgaatatcgacaagctgttgatagccagtcagatagttataatcggcagggttcactggtttaaaactttgtggtgtatagaaacgtaataggttcttttcgttaactgaatccgacaaactcaattcgtggttcacttgtttctgccaagcagcgacttgtttttgcaacctagctgttggttcagttacttctgtcccatcctgattattgtagatggtgccatcgagtactgtgtaatcaggggtgacaaagttatggtttcggaaagccacgacttgatcatgttgtggtgataataaatcggtgccgaattggacgtaatttttattatcaatcccgagtaagtgaagcattgttggtaacgcatcgatttcgccaccatattgtttttggataccgccttttaaaccgttcatgtgaatcatgtaaggcacacgctgtagttgggcgttatcgtagtcggtccacgtttctgggtcgcggcctagtacactgagtaaggccttattatcagaattcgaaagaccgtagtgatcaccatagaggacaatcattgaattatcatagagcccagaggctttaagataattgaagaactcttctagggattggtcaagataatgggcggtcgcaaaatagttgttgaccgctgtattatcagttgtggcacgggggaagtcaccgtctttttcgggtaatgggaatggaaaatggttggtgacggtgatgaatttcgtgtagaacggctgttgtagctgttcgagatacttaatcgattcaccgaataataatttgtccttcaagccgtattgtaagacgttatcaggatcggtgttaaagtaggaagaatcgaagaagtagttgtagccgaagttcttgtagacgttattgcggttccagaaggtgcccacattaccatggaaaacggcactcgtatagtcaccgttttgcttgaggattgatggggcagcttggaaggtgttatccgaaccaagcgttgtaaagactgagccttgtggtagaccgtagacgccggtttccatcatgttttcggcatcactggttttaccttggccaacttgatggaagaagttttcaaaacctaatgtattttgatcatgatagaggctatttaaaaatggcgttacttcgcggccttcgaacttaaagtcgattaggaattgttgaaaactctctaaatgaatgacaatgacgttcttgcccttggcaacgcctgcgtattcagcgttcggtgcagcgtaatgctctttcataaagtcgagcaccggatctaagtcgtaactctcagcttgggcacgcacttgattattctgagtagtcttgaaagcatcgtagacggtgaaggtgtcgatgccgaggtacttaacgatgtagttccgatcaaacgtccgtgataaaatttgaggtcggctgatttcacttaagccaaggttgatgccaaataataagacggccagtgaggtaatactgaaggcccaccaccgattaaatgcgtgtttgtcgatcttgatgaccttggttaaaatcagcaaggctaagacaataatatcaatccaatacagcgcatcatgccagttcatgagggccagtgaacttttgctgagcccagctgaaacttttgaataccctaagatggtgttgatggtcatgtaatcggtgaattgccggtaatagatgacattaaaatataaaagagcggtgttggcggcatagataatcaagcccaaccaataactgagatgcggctggcgaacataaagaatgatgccgaataaaaggagcgtcgtcgcgaccggattaaagattaaaatagcaatttgtaagaagccactagctgcgaggttaaaatcggtgaagtacccgaataacgtttttagccaaaataaaaagactaacaaactcatgaagcctaatctcgtggataggaatgatttaatttttgtgagtttcaaataatgtgacatcctttcaaaaaacagaactaaaagagcgctaatgccttattttaacccgagggcggcattagcgcaaatagcagtttaaagtttaaacagaaacttaacgtttcgcgggccgcatgatggcatcgtactttggattcagttgatctggcgccaaaacatgttgataaacggcttgtaattcatggccgatttctgtaatactcttagactgcgcagtttggtagccttgagctgttaaatcgggaacggcattagtgaccatcgcttggatgagttgactgaattctgcgttagtgtgacccatgtagcagttttgttgatcggcaagccagccatggtaaaccggaatatcgcgcaccaatactttttgatgacttgcaagggcttctaagacgacaatcccttcagtctcttcataagaagggaagaaaaataagtcagcattggcatacgcaccttcgataatatcgcctttgatataaccaggaaagatgacgttgtcgggatgatcctgtttgacaatccggcgaatattggctggaatactgtacatgggtacatctccaaaccagataaaggtgtattcgggtagacctttggcgatttcgacaaaatcgagaatccctttgcgtttaaagaagaggccgacgcagataatcactttttgatcaggctttaaatggaagaaattccgaaaagcagcttctttagctggtgtggcttgatacttagctaaatcaatgccgtttgaaatgggagcgatagggttggttagaccatagctttccaataatgattttgaataaggggtgggggtaattaagtggtcggcttgttgatagaggctaacgaggtaccgtttaacaaatggagcgagttgattggaaccaacaaaggagttgcgaaaatcttcttcggtcgaatgtgcatgataaatgacgggtttccccattttacgcgcctttttgatgacactgcggcttttgagtccgtatgtattgatatgtaagatatcgtaatcttgatcattcggatcaagcgtatagtcaatccccatttcggttaacgcgcgtttttgatgatccaacgcccgcccaattccagatttagcgagtagtttttcactttcaaaatataatagaactttcataaaaggctcctgtttcaagttatagtaatttctattatagcatagcacagtaggcacacatcgggctaaagttgggcagtcgatacctaatagtttaagattcactttagtcgagtaattaagcgttatttattgaaaaaaaacagctataatggacttaattactcattgaataatgaacagataggttaaattagtggaataagtgaggttggttttttggtatttcttgggcgtatttatgaacaatggatcctcccttggggggaacagtataatcatttaccactcatcaaattgacggtggagagtttagataagacgattttgtattgtttggtttttattgtgtgccggttagggtacttattaatgaaacgacgcaaaatacagcttctcccagaactgaaactattgttatttgtgttttatattgccttattggtctcattaacggttttacggcatatttattatccgtggcaaatgcagctccatttgcaacgaccacttagccaaattaatttgacaccgtttgttgagactttcaagttacggcaagcgcccgcccagattgattattggtataacttctacgggaacattgcgtggtttatcccgtttggtttattgcgacggtcattgacacagcgcaaaggggattggttgattacgattattgaaggggctctgttatccctgtgtattgaatccgcccagtttgttttagggactggcatggcagatattgatgatctcatgtttaatacattaggggtgatgattggcgtcctgttatatcaagtcctacaacatgcaaagcgaaaacattaaggctatcaacggtaagaaaacgcttatcgttgatttttttactaaaaaaaacgcttttttacgtaaaatttacgtaagcgcaatcacgactgggacagttgcttacatgacggtagtgaaggctggtaacgattgaatggtgccgttttcctactagccagcggatataaaactatgtataatggattcttgtactttagagaagaagaggaatttataaatggctattttaattgcattaatccctgcacttgcatggggtagtatcgggttagtgagtggcaaacttggcgggaatgcctatcaacaaaccttaggaatgacaattggtgcgctggtttttggaatcggtacctttttagtattacaacccgctttaaacttacggattatggtaatcggtatcatttccggtttattctggagcattggtcaaggacaacagttccaatcaatgcaagcgatgggtgtttctaagacagtcccattatcaaccgggatgcaattgattgtaaacactttagcaggtgctttgttattccatgaatggaagacaacgcacgattacatcttcgggattactgcattagtgatcttaatcgctggtgccacgttaacttcaatgaaggatccgaagagcagtgttgctgctaaagaagatacacaatttgcacgtggttttagagcattaatcttatcaacaatcggttatggtggttacacaatcatcgttaactggtcacacattggcgcaacatcaattgttttaccacaagcaattgggatgttcgtcggtgctgcaatttttgccggtgttggcattgggacagcagtcttcaataagaaaacagcactcaacattagtactggtttattatggggtcttgggaacttatttatgttgatttcaatgaatgatattggtctagcaattagctattcattatcacaatgtggcattatcatctcaacaatcggtagtatttacctattgggtgaacaaaaaacgaaaaaagaaatggtttacgtcacacttggctgtttattagtcattgtcggtggggtcaccctcggtatgatgaagtaagcaacttactaataagtcacctagacaaattgtctgggtggcttattttgtttagagtgtgtattattctatagaaaaggcaaaagaagtgagtcagatgaagagaacaaataaaacagctgtcagttactatttattgagtgtgctagttcccatgttattaatggtggggctatatgcaatgctccaaattgtgccgtttggacggcataatttattgattagtgatctcggtacccaatatatgccctttttggcagagtttaaacggcaaatggcccagatgaatttcagtacgtattcattttcactttcactgggtggcgatatattaccgctagcggcttattatttaatcagtccttttaatttactgctcctattttggtcgaatagccagttgccagtggtggttgggtatgtcattattttgaagattggggcaatgggtttaacgatggcccattttctaaagacgcgtcagcctgaatatcatttttccgcgctaatttttgcaacagcttatagtttaagtggctttgtggcaatgaacttttataacctaatgtggttagacgctctggttttcctcccactggtcatcttaggattagaacggctatttttaaaagggcgtcctggcttatatatctggatgttggttgccactatctttaccaactattacttgggttatatgtcatgtctatttgccgttttgtatgcaattagtttgttaatcaaatggaaacaaccccaacagtcttggtggcaactagtggttcactggcggcaggctatctggcagttttgttgggcgtcattgattgcggggggcacaacagcagttgtgttattgccgtcgttacttggaatgttgaagactgggaaaaagacaatcgctgcaaccagtttttatccaaccccgcagtttggctgggaagttttgagccaatttcaagtcggtggcagccattatacgcaacgcttaattcatgaaccaactttatttatcagtacattagcgctgttatttgcggtctattatttctgtctaccaaccattcgacggcaagcaaagtggtcgaacggctttttaattgttagtttagcgttaagtttctgggtaacgacatttaatacgatgtggcacatgttccagcaaccagaagggtttccatatcggaatacctatttaatggcatttgttctcatcaagattgcctatgaagcaagtattgaaccaatcggtaaacgtcaaacgaaacgcctggttattttgatagtcggtggcctgctcagcattggccagttggcgctctactatgggccacatgtacgtggtgtgcagaaacaatcgctctggttgttaatcggactaatggttttggctagcgttatttttgcagcgtggcaaaaaggagcacgttggcaaccatgggtgattggtctgggaaccgtattgacgtttagtgaactggtgattaatggccgcttgacgaccactaagttaccgatgggcgatcaagttgtttatgcgcaacaataccaacgccaagcagcactctttgaacagcttgaacggcaaacacctgatttctatcgcgttaataaccaagcgattctcttaaaaaaagcgtttaaggaaccgtattatgggtacaatgatgcgttgacctttggacagtatacattaaacaattattcttcgacacttgatgagcggatgcggacgatgttggttaatctcggtttttatagtaagaatgcccggcggattaacgggattgggcatactgtgctgactgacctactatttgccaatcaatatgacctaattgctaagcaaggacaggttgtgacacaaccccataaaacgttaggcttagggtttgcggttaatgaccagctagcacacgtggctttaaaagcacatgaaccgtttgaaaatcaagatcgaattatgcaggcgatgacggggcaaacgacaccattttatcaatataatcaattagatttacaagcgcaaaaacgtcggcaaattacgtttacaacgcaagttaagacaagtggatatgcttatctatacttgccgcaacaaaacttatcaaagctcaaagtgaaaattaatggccgaacacataaagcaccgattgaattgaatgggaccacgattattggtttgggtcgctatcaaaaagggcaacaactaacgctgacaattaccagtcggcaacctaaagcctttcgtaagattcaggtggctagtttagaccaggttcatttcgatcaagcttttgatcagttggcacaacaacgcttaaagatcgacctaaaacaactgtcggcagataatggtcggattgctggtgtagtaccagctaagaccgctgatcaattactttatctaagtgtgccgtatgacagtggttggcatgcgcaagtcaatcatcaaacagttcgtacacgacgagtgatgggcaatatgcttgcagtgccacttgagaaagggactaaccaagttcgcttagtctatcgtgcgccgggactaattatcggcgcgatcatttcaacatttagtttaatgacatggggacttatcttaattaagcaacgccggtattaaaaaagcaggttaacgatgacaatcatcatcgctaatctgctttttattgtggcttatttggggtgtagttgagtggctaagccaagaccaattaaggtcaggccgagcaaactaataaatacgacttggtaaccggcgacacttaaaaggagagttgcaagggtgacgcccagcgcgcccgcaatttgacgaatcgtggttgtgacggcagtgccgtcagcgagcacttgatccggcaggctattagcaccaagtgtaacagcaggcatcatgacaaatgcgttgccgccttcgatgaaacaggcacacaggatcatcaatggtaatgacagccattggtagaagccaatcaaagctagccatccaatgctaatcatggttaggccaacgagtaaggtcggtttaaagccaattttatcagctaaccggcccgcgagtggattcaaaaggcttaacacaacggcagcagggaccaatgctaatcctgaaagaagcggcgtcaacttcaattgagcttgaaaatataatgggtagatgactgtggtgacaatcaatgaaatataggaaatagcagtcaatccgaccgcaatatcgtagttaaggtaactgagaatatgtaaattaagaagtggcgttgtctgggtgagttgccggtagacaaaataacccagtgctaggcagctcactaatccgataccccagagtccgattgggttgatagtgggatgattagcgctactgatgacatataataaaccgattaatccaattgtacataaaacggaaagaccatcaaggtgatagggcttagccggcataacatcagaaatagtgaagttagctgttgctaacacggttaagataatcagaataaaggcgatgaatagtcctcgccagctgaagtagttgagaataatccctgaaataatcggcccacaagctagtgcagagcccattactaaaccagccaggcccataatttggccccgttgattttcagcagtaatggttaataagacagtttgaaacgatggaaataaaacacctactgcgatggcttccaacgcccgcccgaacaatacccaaccgaactgattagcgaagacaattaatagcgttccaatagtaaataaacttaaaatccccatgtagagtcgtttgaatgggatgttgtttaataaccaaggactaatcggcatcatgacacacattacgagcataaaaccggttgtcagccattgaacagttgtggctgataaatcaaaataggccattaaggttggataagcagttgaaagggcagattggctgatagacattgtgaacgtgccggttagtagggtgaatgtaaatagttttagtgctgttccagatagataacgttggttggacaagtaatcagatcctttttttggcttaccttaactataggacgtcatgttttatttgtaaaatgaaacgcaatttgaaatcgttatcggtaacaaaggctaataattagccttttatctgtatttagtatatatttatactcatgataggtatttagatattatattaaagggggaacgaccatgagtgtcaaagcggatcaactatcgactcaggaatacatcgtacggtggaatcaatttttagaacggtttatcgtgtttgaaacagtatttagtgagtacacccggaccagcaagaacatcatcaaagggcgctgtctggtgggcgaaaatttggaatcgttaaacgaatattttcaacgtaacttacgggtttttaaacaatttattgatcaagccacattactaaacccgccaaaagaattacgagaaattaaccgtcagttacaattagtaatgactgattacgtctcgtccgctgaagccatggtcaccgccttcaacgagggtgatgagttaaacttatatcagaaactcacaacgagccgtcaacaacaaaagagtgatcgaacacgcattagtgaacttttaaatcaaatcgctgtttttaaaacacaggcagtcaaataaaaaaacgacacccatctggcaactctcggccggtgggtgtcgttttttttgactagataattttacgccgagcatgttcgataaatttaaacttatcggcacggtgaatcgattcggtaaattgaaggagggtattatcttgtagatgggtgacacctttaacactgactacggagctgttaggcggtaggttcagtatctgacactgttcttcagtggcgggaatcaccgtgaactccttactgccatacccaatttcgagtttgagtgtttcttcaaagtaacgatagagtgagtcttgtgcaaccccttttgaaatgtgggggactatgctagttaagacgtagtcgttatcgattaccaggggctgaccgttaacgacgcgcagccgttgaatgtaagtggcaggtaactgctcttcggattcaagatggaaaagggtttggggaacggtcgtctgtgttaattgcaagacttgagtgtcagtatgcatatcgaaaagactatctaattcacgataactggtcaatcctgaaatcggaaaagcatacttgtctagaccgagaaccaaagagcctttccctttaattttatggacaaagccattttcaagtagactacctaatgctttgcggacggtttcacgcgacgcaccgtagagttcagtgagttcattttcacttggtaagaaagtgccgctttgatagagttggtgcgtaatcttgcgcacgagatctcgataaatcatttcatattttttagccattcgatattctccaatttgttttctcattcctatcataacggggattcggtgaagttgcaaggttagattaagcgctaacaagaaaacggttttaaaaagtgttgaaaacttgtacgtacatgatatatgattacggtgtactgagaaagcgcttttattcatgctacttttaattcaataagattcgggaggaattattatggctcaaaaggattattcacaactcgcacaggcaattgtcgccggtgtcgggggtaaagaaaatatcgatagtttaattcactgtattacacggcttcgtttttatctaaaggacgaatcaaaagcgaagaccgaagaaattaaagcattagatggggtcattaacgttcaaaaggcctctgggcaataccaagtggtcattggcaaccaagtcactgccgtttatgatgccgtgattgcagaaatcgggacagagtttgctggcgaagatgaaacggcccaagttgtggctgcaacaacgcgccaacaaaatttaacgccatggggccatgttaaagaagcctttaatcaattaatcggcgtgattaccggtgcgatgagtccgattgtcggtatcttagctgctggcgggattttaaaaggtgtcttggcgatgctaacgatgccacaacttggcgcgttattaagtgctaagagtgaagcgtacattgtcttaagtacgatgggtgattctgttttctacttcttacccatgttggttgggttcactgccgctaagaaattaaaaggtgatccagttttaaccgctgtcatcggtggtgttctggtgcatccttaattagtggctttaaacgggaaatcattgcttgaaatcgggtcattaaacttcccaatggtcaactacacatattcgattttcccaatgattctcgctgcttggttgctaaattaaccaaatgggttaaaggctggttaccaggctacttacaaattatctttacaccattgattgtgattgcagtcgtttctgccattacgctttacatcacagggcctgctattatttggttatcaaatggtttagcattcgggattcaattcttattattaaagagtggttggttatctgggttattaatcggtggattctatcaagtgcttgttatcttcggattacactgggggattttaccaattattgccaacgatgttgccgcaacgggtcacagttactttaacgtgattttaagcacaacaatgattgcacaaggggccgctgttttagctgttgcgattaagacccgtaaaacagctttaaaagaattatcatttgctggtgcgatttcagcattctgtggggttacagaacctgctatttatggggtcaacttgaagttccgacgcgtcttcattgccggtttacttggttcagccgctggcggatttgtcagtgggttattccacggtaatatgttcggtttcgcggggtcgtggatcggctttgcatcattcttagatccaaaacacctagcagatttatcaaacttatggattttcatcgcgtcatcagcggttgcaacgattgtgccatttattgtaacgctcgtttggggttataacgatcaaatgacagctggtgaagcaatggctaaaccacaaaaaccaggaacagcaaaataaacgactgaaataggagagatatcgcatggcatggtggcaaaaagcaacagtttatcaaatttatccgcggagctttcaagatgccaacggtgacggaatcggggatatcaacggcattattcaacggttagattatttacaaaatcttgggattgaattgatttggttgacgccaatgtatgtttcccccggtcgtgataacggttatgatattgcggactattaccacattgatcccatttttggtgatttaaccgattttgaacgactcttaaatgaagcccacaaacgtgggattaaaatcatgatggatatggtggtcaaccatacttctgatcaacaccgctggttccaaaagagtctcaaaggcaaggataatccgtaccatgattattatttgtggcgtgatccagtggatggacacgaaccaaataattggttatccaagtttagtggcagtgcttgggaatatgtgccagtacttgatcaatattatcttcacctatacgaaaagagcatgccagatttgaactggcggaatgaacacttgcgggccgatatttttaaaatgatgcaattctgggcagaccttgggattgatgggctacggttagacgtaattaacaatatctcgaaggataaagacttcccgaatgatacgtttaaaacgccaagcgacgatgggcgcaatttctatacgaatggaccacatgtgcacgaatacattcatgaaatgtacgaaaaggtctttggcccgaaccaatttgtcacggttggggaactttcctcaaccccaattgatgaagcgattcgttataccaatccagcccgtgaagagttatcgatggcgtttaccttccatcatgtgaaggttgattacaccggtggcaaaaaatggacgctaggcgattatcggctgtctgatctaaaacgggtgcttagtgattggcaaacggggatggctgccggtggtggttggaacgcattattctggtcaaatcatgatcagccgcgtgccgtttcgcgcttcttggatgacggtcaataccgcgatcaatccgctaaattattagcattagtcgaatttggcttacaaggcacaccgtatatttatcaaggggaagaaattgcgatgaagaacgcgaacttcaccgccattgaccaatatcaagacgctgaatccatcaatgcttaccatcaaatgctaagcgacgggattgatgaagcgttagcgattaagattttacagcagaaatcacgcgagaactgtcgaattccgatgcaatgggatcaaacggcgcatcacgggtttacgactgggacaccatggttaatgccggttgagcacgatgattactcagttgccgctaagattcatgaacccaatagtgtctttgcattctatcaagaattagtgcgaatgcgtaagcttatgccagttttaattgaaggggactaccaattatttgaaccagaggacgaagcggtttacacttatcaacgacacctagatactgaaacgattcgcgtgatggctaattttactggtcaaacacaagtccgttcaataccacacgtcaaggacgtgctcatggataattacgaacaaccgcagtttgatggtcagcaaatcactttacgaccttatgaagctatcatgatgcgggtttaagaaaagaggaagaacgatgtttaattttttgaaaaaaggaccagttggacaggtaacagcccccgttgctggcagttatttaccaattgaacaagttaccgatgaagtatttgcaagcaaggcagttggcgatggctttgccattacccctgatgaacggcaaacaacgattagcgcaccaattgatggtgttgttagttcgattttccccactaaacacgccatcatgattacaacaaaacaaaatgttgagattctgattcatatggggattgataccgttgaattgaagggcgcgccatttacgatgcacgttgaagcgggtgatcgtgtcaaagctggcgaagcgattgttgatattgactggcaacaactagcagccgcccaaaaggcaacgactatcatggtcgtcagcagcaacgccacctttgcaccagcagagccactaccaacaacagttacgactgacaccattattggacagttcgacttagcggcagaataggtgggttaagatgcaaccaatcattattgaatctgatgatttcggggtgaccataccgatttcgcgcgcaatcattactggcttaaaaactggcgtgatttctaccactaatgcgcaagtgacatcgcctcattttgaaatgagtgcggcactcgcccagcaacatgggattacggcaatgggattgcacttggttttcgacaaagaccgcccaattagtcagccactgacgattcccagcttggtaaccccggctgggttttgtcatgcttatcaaaccttacaaactcatccaaaacagttggccattactgatgttaagcgtgagtttcaagcgcagattgaccgctttttggcgagtgggttacaactcacgcatttgacatcgcaccattttgtggcaacgttaacgcctgaaatctatgcaattgttctagaactagcgcaaacgtatcatgtccctgttcgcaatgaaacggcgcatttaagaccgacagaacaagcggcctacctgctattaatatcggaatatgccgttttaacgactgggacgttgataacggcgcaacaaacaccgtatttaacgccacaggaaatcaaacggcaactgacacagaaaaatttggtaggtacgccggtgatcttaagtcatattgggtatttatcggcagagttacggcataagagtcgtctgacgacgaatcggatagccgaattcaatgcgcttaaaacattaaagcaaaccaattattgggatcaatttagttggcaactgacggattactcagaattaggagcgaagtagcaaatgacacaatatcaacatttaacggtacttggtgatagcatcacggatcaacgtaatcattacgcacacaaatggtactaccagtggttagcagaatggctcgcgattcccacaatcaccaatctcggaatttcggggtcgacgattgcccaaccgtatgatccgatggttgaacgctggcaagccattcctgaatcaacggatttattattgatttatgcgggtgtgaatgactttggtcgtgatgtaccacttggtcaatttggtgatcagtccacagtaacattctacggcgcactacaaaaattacttgggcagattacgaaacgttacccacaagcgacggtttattttatctcgcacgttcacattgggactgacttcttttcggccgtcaatcaaggcggttatcagcaacaaaattatgaacaagcgattgcgcaagtgacggacttgtttggcgttcagcatatcagtttgtttaacgaatcagcgttgtcatttgcggatgcacaacaagcggctgagctgagtttagacagtctccatcccaatgatgctggccatgaaaaaattgcccagttcttgagaactaaaattagataagcaaaaaggcatcgagctaaaagttaatttaagctcgacgcctttttttgtggctgaatttaagttagattagaacaaatgatgacggatttctttagaagagttggccaatcccgtagtgaatggccattgtaattaaaccaattaggatgttccgaataatggagactttgactttgccatcgcccagtttagcgctgataaacgcggtaatggaaaccgcgatggtgacggcaatgattgtgccggtcatcttgtaggcttcaggcagtagaatcattgtcacaagggggaagacgccaccgaaagcggctgagaagagggatgcaaacgctgcggcccacgggttcatataatggccaagctctaggtcatatttaacattaacaattgttgctaaaggcttcttatgcattaagtccttagcgattgcgagtgccgtttcagaagtgacacctttggcttcgtaaaaagcttggacttctttaatttgatcatctttagctgtttttaagcgtgcttgttcaatggcaacagcggctttttccgtgtcactttgcgaactaactgaagcatattcacccgccgccattgaaaaagcacaggctaataaatcagcaagtccagcgataaaaatggtgaaattattggttgttgcggcggcaacactaaagagcacaccgacaacggttagaatcccgtcattagaacctagaacgccggctcgaagggtattcatcttttcttccatcgtttgatggggtttttcagttgttttgagtggggctttaagaggggtcataaaaaaatcctttctaagcgattattgtttgaataatgtcccaatagcgtaagtgactaccatggttaataatccggaaatcacattgcgcaacatggcttttgaacgattcgctttgccgagagcggctgcactgtagccggttagcgcaagggcaatcatcactgcaatgatggtggcttgcacgcgaatggtttggggtaataaggtgattgcggctagtggcaaaatagaaccgattggaaatgagatgaatgacgcaacagcggctgcgtaaggactggtaaaagcagtcgggacaaacccatatttttcacgtacgacagtcgtcaacggatcagcagtcatcatttcgtgtgtagcccgattggcaagttcaggatcaatcccagtgttgacgtatttttgccgaacaaaagccatctgagacgcataattactgtttaaattcaatttcgtattaatgattgccatttcctgtgcgtctttttgcgtgctgacagagacgtattcgcccatcgccattgagatcgttccagcaatcattccggcaattcccgaaatgaagatggcgaagctattgcttgtagcgccggcaacaccgataacaattccggcgacggataaaatcccatcattggcacccatgacgctagcccgcatcacgttaattttttgggcgagtgataatttttttgacaaggtgaagcctccaatactttttattactttataatgattataattaataacaactttcattttagtcaatttaatttgaaagtcaagtagcaacctagaccaattaaatttgaaaaatggcttgccttcgagtgtactttaaggaatatgctaaagacattaaagaaggggtgattaaaatgagtcgcattttagtattaggggcagccggacaagtggcccagttagttattgagcaactgttgaaagaaaatcaacatgagctcgtgctatatttacggcacgctgaacggctaagcgcattagcacaaaatccacatgtcacggttattgaaggtgatgtgttggatcaagagctgttggcagacagtttagctggggtcgatatcgtttacgcaaatttaggcgggcagttcgaaccattaatgcaaaacgttgtcgcgacaatgactgcagcgggcatcaaacgattaatctatatcagtggattaggcttgtatcatgaagtgccaggtgcttttggtgagtggaatgaacaagcagtcggccatgaagtcatggaagacacgcggcgggcggcgaagattgttgaacaatcttcgcttaactataccattttacgttgtgcctatatgaccaatgaagatcggatcgattacgaattaactgaaaagggaacaccgtttaaagggacgattatttcacgacggagtatcgcgcaagttgttgttgatttagttaatcatcctgaaaaaggaattggggcaagttggggcattaatcagccgaatattgatggcgatcgtcctatttattaaaaaacttgccttatagtgtactctaaggtataagctatttttgtaggagggatgtcgatggcacaagagcagtacaaaatcggcgagtttgctaaattagttggtttgtcgacttacacattacgttactatgaagaccaaggcttgattatgccgcaacgcgatgcggccggtgtccgcttttatacattagaggacgttaagtgggtcgggtttatactccatctaaaagggaccggtatgcggattacagaattaaagtaatatgttgcattgcgggctcaaggagacgcgacgattgaagcgcgcaaagctttattgcaaaaaacaaaggctcaagctgaagccgaattggctgagcgccaagcaaatttacagatcctaacgcgtaaaattgattggtatgatggtaaattggatcagagtatcgatcaagcagagagttttgaaacgtatttacaacgatttgaatcctaataaagtgaggttattagaatggtcaagaatgaacaattaaaagaaaaacaattattcccagttggagaagctaatgtggcttatcaagacttcttcgtcggtcaaagttatttatcaatgttagtgaacgaaccagacgtgaatgtcggtgtcgggaatgtcacgtttgaacctggttgtcggaacaattggcacatccatcatgctgggtaccaaattctattggtgactggtggcgaaggctggtatcaagaagaaggtaaagcagcacaacacttagtcccaggggatgtgattgttactaaagacggcatcaaacactggcatggggccactaaggatagctggtttagtcatgtcgccatcactgccggcacaccagaatggttagaagctgtttcaaatgcgctttatgacgcactttaattcagaaaggggtttttaaaatggcaaagaaacaaacagcaggccgcgatctattgggtgattttgcacctaaattcgctgaattaaacgacgatgttttattcgggcaagtttggtcgcgtgaatcagagttaccagcacatcaacggagtttaatcaccatcagtgccttgatttcaggtggtaattttgaataattaccagcgcatttaaagattgataaggaaaacggcattactgaagctgaaattgtcgaagtgattacgcatttatcattttatgtcggctggcctaaggcatggtcggcgatgaacgctgctaaagcggcttatcgaccagaataattaatcagggattaggacagataagattgtcctgatcctttttttgatggtatgatagacaaacaaatcagcatcaagaagtggaggaaaggccttgaacgagccacaaaaaaattataccaacggtgttttaatgactttatcagtgattggaatgaaatggaaaccgttgattctctgtcatcttgtggcaggacctcaaagaccggccgaacttaaaagagtcgttcagggaatttcagccaaagttttaaccgatcaattacgtgaattggaacgagatggcatcattactcgaaaagtttttaacgaagtacccccacacgtggagtatgcgatttctgcgtacggcaaatcattggtttccgtcctaggaatgatggccaagtggggcgaagatagaatcgactttttacagagcaatggtgatgatgtgcagttggattatcgagaccatgagaaatacgatatttaaagaaggcgataacatttattcaaaaagaatgttgtcgtctttttagtgatttcacaaaacttactttgaggtgcgttagttagttgaaagtgcgtaattgtttattgcgaagtacccgatatactaaccttatcaactaaaaagtgaggggaaaagaaatgaatgatattcaaaataaagtcgttgtgattaccggtgcatcaagtgggattggtaaagagacggctaccttattagcagccaaaggcgcaaaacttgttttagcggctcgacgaacaagtgcgttggcggcgttggcaacggcgttaaccgctcaatacgacactgaggttatttaccgacaaacggatgtgacgcaattagcagacatgcaagccttaatcgaattgacaatcgctaaatttggtagaattgatgtgctattcaataatgccggcttaatgcccgtctcaatgctacgcgatggtaaagtcgatgagtgggaggctatgattgatattaatatcaaaggtgcgctatatggcattaaatatgccttacctttaatggaacagcaaaagagtggtcatatcattaccacggattcagttgccggtcatttcactggtgaaggcttatccgtttattcagccactaaatatgcaatgcgcgcagtgatggaagggttacgtgtggaagaagttggaatgggcattaaatcaacgttaatctctccaggacatgcgcaaaccgaattagccagccggatagtgatccgcaattacgagcagctgttctcaagagtgaaactgaaactggattaacagcaaccgatgtcgctaatgccgtaatgtacgccatcgatacaccagataatgtgggcattaatgaagtcattctccggtcaattgatcaaagagactattaagccattggtcaaagattgaattgagtcttgacaacgaacgctaaaaataaaaaatattttcgaatggtctagttcagcgcttgcaatcgtaagttaacggcactttcaaaaaggctttaaaatcagctaccacaaattgaattaaatacaagagtttaaattagaatgcttagtgtgtaccatatatagtgttgtttcgtcagatggtacatcaatatatggaaaatggtgttgacaatctggagtgataactaaattcatataaagaggggttcagttcaatgcaagacaatcgtgcaatcaccagtgtatttaatcctaagtggtacattcaacagatgaaagggtggacaacatccagttatggtttgttgatgtttgggttaggctttattttagctgctactatttccggtggtccaataactggcgtgtcgtttttaacgatgctcgcggggatgttaggcttcacctgtactattagtattacgaatacgaaacctttaaatggtgtctttggtgtcatctctgcattaatctacattattgtggcttataatgctaaaaactataacgatatgttattacaaaccgtctacattattatgttagacatcccagtcttattaatgccagattgggcgcaaaacgttgataaaaaagtccgggggcttgctactcgtggtaaaggacttcgtaattgggcgttgacgctattgttctttgctgtatcagttgggttattatatctctgggaaagcaatatgacggacagtccacgaccattgatcgatagtatcgccgcttcagttgggtttactggcgcactgttgaccacattacggtttaaagaaagctattacttctggttcatccaaagtatcgtatcaatcacgttgtggggcattacagcaatgcagggtggttcaaattgggtcttattcttcacctatatcttgtacttatcaaacgacttagtctcattcttcgacaagaacgtcgtttggttccatcctaaagaagccattaccaaaaattaaatcaataaaaatagcgtcccaacacaccgcaatgtgttgagacgctatttttatgatggccgggttgttttatagttcaacaccgttttcttcaaataattctggtaatgtcttcagtgattgaccatcgtattctgcgaagaaatcagccacgctgtattctttaccagcaggacgagaagcatcatagcttgcgctaattgtttctgttaacttaccatctttaatggttagttctaattcttcaactggaatactccgtttgtcagtgatcttagcatcaattaagaatggtcggccagcttttgtgacttcaagggctttgtcaaaggcagcgggtaattctttagaagaacgaacggtgattgattcaatgcccattgcttgcgcaatcatggcaaaatcttgatcttcaatgaagattcctgagtaatccattggaatatcatcttgttcactcttgatgaagtttaatgcggcatttgatgtgataatgttaatgattggtaattggtatttcttttcagtgatcaagtcttgcatgaccattgaaaaggcaccatcacccgagatgttgaagacttggcgatctgggtagctcaattgaccagctaaggcaccaggaacgcctgaacccattgaagcaaagagggcagaaatcacccatttgttcttaggcgttaagttcaagtgacggaaactgttgatgatattatcaccaacatcgattgaaaagacagcatcgtcttcagcaatccggttgatttctttgtagattggttcgaattcaagcggatcagagtcgcggttcgttaaaacatcaaggtaggcttgccagtttgccatatcagcaacagcagctttgaagaatggtgttggggcaaccgtttcacttctggcgattactttttcaacaaaagcagttgcatctgaccagatcccgaagtctaagaaatggtgacggccaaattgtgcttcatcgttatcgatttggataaacttgaagtcatgtgtccgataaattaagttggcaaatgggaagtcagcaccgatggcaatcacaagatcactaacggccatgatttcatcagccgctttagaagcagcccggttagacatgcctaagttaccttcataactatcaggcactaaccctttagcaagcccagtcatgacgattggaatttgaagtttctttgataattcaacgagcttgtcgccgccgtctttaatcccacgaccaacgtgaattacagggcgtttagcgtctttaaccattgctaagaattgatcaacttcttcgtctgttgcgactggaccagccacttttttacgatctgaaggtgagcttgagctatatggtgtatctggaatttcaacgtagccgaagtcatttggaataacaaccactgcgacgccattgtgtttgtaagcttcacggattgctttatcaacaacgtatggcaagctttcaggcgtcataacgaggcggttataaacagcaacgtcagagaacattgggttttcagcaaattcttggaagtagttgtagttcatgttcttgcttggtacttgaccaatcaaggctaaaactggtgcatgatcttcttttgcatcgtataaaccagttaaaaggttagttgcaccagggccagctgaaccaaaagcaaccccgattttaccagttaatttagcgtcagcagctgcggcaagggccccaacttgttcgtgacgaatttgaatatattttaaacgatccttttcaatattaagagcattcattgttgagttaaatgagccaccagggtaaccaaagatatgatcaacgccccaagattcgataactctaagcatagcaacactagctggaatagttttttgagtagtaactgtcattatacagatctcccttaaatcaataattaggttgcgcacaaccttatgggaataatttagcatacttagaaaacgattacaagtgttaaacgtaggttaatcatatccttaattaattaaccgctgataaattggtgcttgataagattgaatggatttaagcagcaaaaaccgcgctatccgaaaatggttagcgcggtttgattagtttaaatagtctagtaaagtatcgacagttaatgcttgcttttcagtcgcgttcaagtcggcaatcagtttaccggcttttaacaccaagagtcgattgccatattgcaacgcatcctctaaatcatgcgtaatcattaggcaggtgagttggttatcgcgaattgtttgattggtaaaagtcatcaatgcttggctggaaactgcatctaaagcagatgtgtgttcatctaataacagcaattcaggtttttgaatcgtcgccatcaagaagtttaacgtttgtcgttggccacccgacaagttactaaccgggcgattgagttgttgatccaagtgattcgggagtgtcttggcgagcgctttgatttgtgggagttgttgcttgagacgccggggaaataagcggcggcgttggccacggcgcatcgccaacaaaatattttcggcaacggtcatatcagctgcggtgcccaacttaggatcttggtagacacgactaatgagccgtgtgcgttgttgggcggattgcttcgtaatgtcgtggtcgttgaatagtagttgcccacttgtgggggttaaatcacccgcaatggtattaaaaaaagtcgatttacccgcaccgtttgcgccaaggaggacgacaaattcaccaggattaatcgtgagatttaaatcatttaagagttgtttaggttcattattatcagtaacttcaaaattgaggtggtttaaagtcatacgcggggtcatttggtagtcagtcctttcttttgttgtggtgcgatgatgaagatggccaaaatgacggccgagaagagtttgaaatcattggcgttaaagccgagttgtaagacaaggagtaagatgaggcggtagacgacgcttcctaggataatgctaattaatttggcgatgaaatgcttgtcgacaaggagccgttcaccaatgatgatcgcggataacccaatgaccatcacaccgatgcccatgttgacatcagcaaagccgttatattgtgcaacgagcccacctgcaagggcgatcaagccgtttgacagcacgatcccaatcgttttcgtccgctttacggcaatcccttgtgagagggccatcgtgggattatcaccagctgcaatcagggattgaccgaattcggtgtagagtaagccagccagtaataatagggcgatcagcatgatgactaggttaatgactaagagccgttgatcgagcgttaattgatggaatagcggcagttgatataggttgtgttgatcaccaattgccatgttggcttggcctaaaatccgcaagttgacggaatacaaaccggttagcgttaaaatcccggctaacaaactctggacatggaagtagttgtataaaattgccgtcacgagtccggctaaacagccaccgatgaatgcgactaatagggaaaaggcaatgttatgttgttgcaacattaaagcgctgagggctgcacctaacgggaagctgccttcaacggtcatgtcagggaattttaagattcgaaaggtgatgaaaacgcctaggcttagtaggctccataataatccttggtcaatggttgagataataagattcatttgagaacagctcctttttgattagcgatttgcattaaactctgcggaattgtgatgtggagggcttttgcttttttgaggtttaagactaaatgtcctttgcgtaaataccgaattggagtggttgcgggttttgaacgaccacttaaaacggcggcggtcatcttaccggtttcaacgcctaagtcgtattggcttaggccgacggttgcgagcccgccatctttaaccatcgtttcagcggatggaaagactggcgttttggttttgtcggtcacatggacgagggtgcccattgcactagcaatcgtattatcggtgggaacgtaaattgcatcgacttttgggactagattctggctgacttgttccagatcgttgactgaactaagactggcctcaacaacggtcagccctttttgttcagcaagttgtttgaataagtgcatttgactggtggcagagttatcactgcttgaatagagaatgccgacggttttcagttgcggcatgatggtttgcattaatgccaattgcttttgaatcggggcttgatcggatacgccggtgatattggcaccaggatgggcgttgttcttaacgagattggcactcgccggatcagtcacggcgcctaagataatcggtaattgcttagtggcattggctaagctttgtgcggcaggggtggcaatgccgaccgttactttggctttttcagtgacgaattgattgctcatcagacgtaaattactttgatcgttctgcgcattttgaaaatcaattttgatattacggttgttatgatagccttcgcttgctagaccagcgacaatcccgcgatgaatttcatcaagtgcgggatgagataagggttgtaaaatcccgacaattggcaatttaggttggttggcttctttgatttttttgataccaagtagggtgagcaaactcccaaaaattagaatgaggggtaaaaaacgtttgagtttagacatggcgaaagctcctttaacgtgctttttgaaactgactcttgtgcttaactacatttaccaaaccggtgattacatcaccaatttggtaaattaggttaatgctcagagtcaaaccgtttcaaacgcacttctattttttaacgtgcttttcaaaccgtattcctgtgcctagctacgtcgcacaaacgaccgactgcgtcgttcattcgcaccactaggctagtgttcgaaatatacccggtttgaacgcactcattattatcaaacaaaaaagtcccccacatgacagtcatgtaggggacagaaaaagcctacatggatttcctcgagttaaaatccatgtaggcttaaaattcaatcgattactgatgaatggccgcatggatacaatcaaaagactgtatccataacggcatacaatctcacttagcggctttgccaacgaatattcaattgtactaagtgagtgtttgtcattttcagtaacctccgttttatttgatgatttgaagtatagcgggatgggtgaaacaagtcaaggactttgagtaattttcttttgaaaataaaggtgggtctagtctgaaaaagcggtcgatctggcttgctttttagcactaaaaaagctaaagttattaacgtatacttgtgtttaaaaacaggaggaataagacaaatatggcacatatttcatttgatgcatcccgtttggacaaatttgtccaatcaaacgaacttgcagaaatgcaagcaatggttaatgctgcagactcacaattacgtgaaggcactggtgcaggcaacgacttccgtggtttcttagatttaccagtgaactacgataaggacgaattcgcccgcattaagaaagctgctgctaaaattaagagcgattcagaaattttcatcgcaattggtatcggtggctcatacctcggtgccaaagctgcaattgatttcttgaataacacgttctacaacatgttaccagcagaacaacgtgacttcccacaagtattattcgccgggaactcaatcagttcaagttacttaaacgacttagttaacttgatcggcgatcgcgatttctcaatcaacgttatctcaaaatcaggaacaacaactgaaccctcaattgctttccgtgttttgaaagacaagttgatcaagaaatatggtaaagaagaagctaagagccggatctacgcaacaactgaccgtgctaaaggcgctttgaagacagaatcagatgcagaaggctacgaagaattcgttgtgcctgatgacatcggtggccgtttctcagtattaacagccgttggtttattaccaatcgccgttgctggtggggatatcgaccaattgatgaaaggtgcagctgatgcccgcactgaatacacagatacagacgttatgaaaaacgatgcatacaaatatgctgctttacgtaacattctttatcgcaaaggttacacaaccgaattattagaaaactacgaaccaacattgcaatatttctcagaatggtggaagcaattgatgggcgaatctgaaggtaaagaccaaaaagggatttatccttcaagtgctaacttctcaactgacttgcattcattaggtcaatacatccaagaaggtcgtcgtaacttgatggaaacagttgtcaacgttgtgaaccctaacagcgacattgatattccaactgatgaaaagaacttggacggtttaggctacttagaaggccacacaatggacttcgttaacaagaaagcttaccaaggtgttgtcttagcacatactgatggcggcgtccctgttatgtcagttaacatcccagatcaaacagcctacacattaggctacatgatctacttcttcgaaatggctgtctcaatctcaggttacttgaatggtatcaacccattcaaccaaccaggtgttgaagcttacaagaagaacatgtttgctttattaggcaaacccggctttgaagaattaggcaaagaattaaacgaacgcctataattcaacgtttataaagataaaattcgacttttattaaagcatttagtctattgattttatgaaatggtgcagtatttggtgcattgttctaaaataaatggattaaatgctttttgtttaatacggataaagaataaaatatataaattgcttatttttagtaagcgaagtataatgaccttatcaaagatgaccaattcatcaataatattaaaagtaaaaatggagatgatggcaatgttagtcattcaatatgtcaacggtcaaacgaacgctgaaaaggtttatcaaaaagcggctgaatttgtcgcaaatcaacaactggaagtacccgatttcgaagattacgtcgcaattaagcaggtgacgttggatgggcagccattaacattggcggatgcgaccatgcgcggcttatataattatttaaatcaataaagttaatctgaaagaaaaacgtcgctcaagagaacggcgtttttgagttataaaataaaaaagaccagccaacggcagtcttttaattaacgtgtagtaatcataatgagatttgagctgtgataagtttcgctaggactattttcgaggataaaagccggcgtgtccttaacaaagtgcgagatttttgcgacgatatctgcagcagcacagtctttgatggtcaacttatggcgtgaaccattcgtagaaccaaaggcagataatgtgtcattttgttggagcgcaatttttgagccctcgttaaagaataacttaaccataatttaaaaccacctttcgtaagtaaatcatataatattgataagaaaatcacaaggataattaacaattcaatacccttaatattatccagtgcaattacttttcggaaaattattcgttaaaagaaactactttttctaatattcaaacgccatttcattaaccgattcttccaagccttcgacaacttcattttgttcaatgaacgttaaccaagtttgatattctttggcgtgttcaccacgaatgttgaatgctattttcacttgaatactagcgataaattcggcgaccattttatcaacggcccgatcgaccttattctcgttccaacgtttggcaggttggcgtttttggttcttttcattttggtagtctaaacctttggctcgaaatgtatcgatgatgcgggaatgttcttcaagataggcctgtagttcggcattgttcatagtcgtgctcctttaaactctaatagttagcaagtaaagattttagttcagcttgggcagcggtgtcttcagaaacggcaaagacaagtggttctgagtaagcttgtttgccgtcatcttttagttcgctgaaaccatcattagttgatgtgaggtgaccattacctaatttaagttcatacacgacgccgttatcaccaagtaggtatttgctaaccggtttgtccattgccatgttaaggctgtaattatccgcgaatgatccacgatctaaattgtctttaccgactgttccatccaaagcggtataaaagacacagccaccaattgcatgaacagggtaggcattaaaccctgggcttgctgtcccaggttgaactaaaatgcggccatcaggtgaattggcaaaccaatcgccaaatccggcagcaccgtggtcaaaataccaatcactgacggccatgtttccgattgtggcgcgttcagccacccacgctagaaaagcttgattaacagaagtttgttggtcggcagtgagcgcttttttggcacttgttgactgattagattgttgttttgcttgttcaatagattctgaagctgcaacgatactttctgattgttgtttaatagaagcttctttcgagctagcgattgatcgacgctgattgctttcttttgcttctgatgaggcgcgatagcgtgctaaactttcggagtgggttgcggcttgttgatcaggtttaattgaccgacaactagctaatgaaagactacttaaagtaatgaacgtgactgcaatggttcgtttatgcatgttaaatcccccaagttaatgattaataagtcattgcacggtgtccctgtggtgcagcaattttccagaatttatcaaatgagattttttttcgtttgccggtatatggatcgttaaaggtaaatgaattttgatcatagccaattaataagacggaatgcgctggttgtttatggtagttaatccaagcgacaattggtttcttttgttttaaagtagctttgagcgtgctaatcggttcgtccgataaatcggtgaaactgccgagatattgatagaagaatcctgtccaagcaggaggatacatagtgtagccagtatcatcgtatggattcccccaaaagccgacctccatatcgccatcattgacataagggatactatcggccacttctgttttgctcatgtcaacgccacggtaatctaacagcatggcaacagccgtaatttcacaaccggttggtaattcaggaaattgtgaaatgggtgtgatgtcgagcatcgttttttttggtgtttttttcttaacaattttttggggtgtggttttatggaagaaccaaatcccggcctcacttctggccggtcctgtgaaaagccataaaaaaagggtggtaatcagtattaaaacgactgccacgcgcttgtaaaggtgttttggcatttgataatcctcattctaaatttagtcgacgaaataaatatttaaaatagtatagcatttaaaggggcgcaatagctatagccgctcacggatttcaactgtgatggaatcgccaatttcttttttgagttgtgcacggatgtctttgcggaccccaagaatgtaacaaatgttgccatctggatttttaagtcccatattgacaatactgccatcatagggaatttgttggtcgaaaagggcgtggacttttacacgacccttcccgaagattgcgcggatatcgccaggaaattagacatatgcaccgcctttaccaatcgtcgcggcttggattgaggctgtaaaagtataagtttgctcggtcaccggtcagaactccttaaaaaaaacgtcattaaaaaaagtgaccacggcaaattcagtcgtcacttttagtgattattggaaaaagcgcattaattggcgattaaaacttgcccaccaagtgtttgggtgcaaaagggttgcaacgattacttggcgatgttgtaagaaccagcgcttaatattttgatcagacaatttagtgatatcaaacggcatttcgaaccactcctaaactacctttattatatattagaaatgggacacgtcaaaaacaaagcattaaacttaaccaatctttaaaccggcttaaggcttaattaataagacgttggtgttagaatgaacactgatgaattgtgcaacagaaccgattaagagccgctcaaaggcgcccttaccactgacaccgagaactgttaaatcaatatgagcttcttctgggatggtaaaggctaattcacgacgtggcgaacccactttaaggatggctcgtacgttagggacaccgtgttctttagcgaattgcaccttttgatcaagatacgattgaacgaaatgtttttcagatgtcgttgtttcagcagggtaagtcatgcgtgcatttgtgtaaagggtatctggaataatttgagccacaactaattcggcattattgcgtttagcaatttcaatcgcctcactgaaagcgcgttctgataactcagaaccatctaaaccgataagaatatgctgataattaaacataaaaaaggcctcctttatttaccttcagtatagcattttaaacgaagaaacgccgtaaataagcactttaaattcgataggggatagctggttgagtgactataacaatttggcaccactaatttgtgccgaccgtatcgtttactttgattgaactgcgccctataataagaatgtgaataatttctcccgaaattttttaaccactatataaaaaaagagccgtcgaatcgtagattcggcggctttctttttataaatgattaattgaaagttgtgtgacttgttgcttgttgttattggtcgtcataacggtatagcgaacttcgcgatccgtcagttgcattaatgacccagatttcttaagtgagcggtcgaccaattcagtaatctgggttggtttggttccgatacttgttgaaaaggcgaggacgtagtttttaaacgttagattcttacctgcgttgagagctttaattgagatccccagtactttgctatcactgacgttcatggcaatcacgttgttgctgtcaacttgatcagtgcgaatgccttcaagtggattcgcttcgaaaacgcccagtcatttttgttgggcaatcggattataaatctgaataaagttcggccattgcacaatttcttttgcgacagggccttcaacataagttggattacgcatttcttcattatcagcaagtgtaatccggtactgcatagctttgtaagggacttcgaatgtgaaagcatcatcggttgttttagtcgtatgaatggtatcaccgatttgccaataaacctttttatgtttagtcttaccagtgattttcgcattgaagccactgtttgtttcgtggagctttgctttaaccggattcccacaagcggttaaaataaaagttaggcctaaaatcatgaataataatttgacgtgacgcatctctcacactaccaatcgataatagggttaactatgaatcgaaaaataagagactccccagtcttctacttcattgtaacccatttcatctttttttcaaaatcaccatattcactatttaatactactgtaagagaatttcaacttctgaattgcgcggacatgtcgttgattagccttgtaaacatcatcagtgtattcttggaaagttccgtttggacgggttgcaacagagacgaacgacccagtcttggataagacatctttggcataaacgagttcttggcgattgttatcagtcgcgtagtctttcattttttggtagtcaccttgagcactgacatagtaatcatcagcgtcatcgagttttccttgtgctagtaaacgccgaccttcagcagcaacagcactatcatgatcgttataatcaacatttgcgacgttaactgttccgttttctgttaactcgccccaaactttattatacttttgagcgatgaattcagtggcaacagtcgattttttaatatgtttgatgaattggcgttcagctttatcgaattttttatctttcttttcaatcttcgctagttcttcgcggtgttctttctgagccatgtagaagttatagccaacaggagatgccgcgataatcaaaccaatcaagcaaataattagaggggctttaagccgttttttaaaaattaagaaaaataggagcaggataatgccaaatgcaaagacagcaaggcctgcataaagaacgatggcgagtattaagttcatatagtaacctccaaaacagtaatcggataatcagggttaatatggttaatcaatgaatattatcccattttatgagatattagcaagtcaaatttacagaaaggtctgtaaaaatatgaatcttctcatgaaagggatttaaacagaaaagtcaattgtttttccttgcattttcccgtattataatatgatacgtaaaaatatgaatcatttataggaggaatagtagtggacgcttctttgacaacccgtttggctgccgaatttattggaactgcaattatgattatttttggtaacggggcagtagccaacgttgaattaaaaggaacaaaaggttttagtagtgattggtttttaatcgcttttggatatggttgtggggttatgattcctgccgttatgtttgggagcatttccggtaaccatcttaatccagctgttacattaagttttgcagtgatgggcttattcccttgggaaaatgttttaccatacatcattgttcaattcttgggtgcaatggttggtcaattattattggttgctgcttacaaaccatattatgatcgcacaacaaaccaagaaggcatcttgggctcattcgtaacaatcgatgctgctcatagccggatgaatggttttgtaaatgaatttttaggcacattgatcttagttttcggtgctttagcaattggtgcaggtaagtttggcgctgccggccatattgttgttggtttattggtgatgacattagttgcttcattaggtggcccaacaggaccagctttaaatcctgctcgtgatttaggcccacgtttggtgcatatgttcacaccgcttaagaacaaaggcgactcacaatggagttacgcttgggtgccagttgttgcaccaattatcggtgccatctgtggcgcaggtattttccaaatgatttttgcataacaaaccgcttctaaaaatagtccgtcaggactattttttttgctttcaaagcaaaaaatacccggcataaaccttaattgggaaaggcctataccgagtatcttctgaatattgaaatgatcttacttgggggagtattaatcatttctgttattgaatatatcataaaataacgggagtttacaacccttttacgtgtaaaaccctaaaaaaataaattattttataataatgcatattattaatctcagtctgcaatttatttaacgtgtataatatttcggaggtacgcatattaaataatcgactgagaaaggtgtgcgaccactttagagaaatggtacaatataaaatgttggcgattacatttaaggagagtagcgtttatgattaaatttccagagcattttatgtggggagcagcaacatccgcacctcaatcagaaggatactccctaagttatggtaagtccccatcaacctgggacaaatggtttgagatgcaacctgataagtttaatagcgatcaagggcctgacacggctagtgatacttatcggttgtatcgtgaagacgttgaaaatatgcaaaagattggtttgaactcatttcggacatcgattgcttggacgcgattaatgcccgatggcaaacatgttaatcaagtagcggttgatttttatcgggattattttaagcgcttacgtgatgcagacattacaccgatcattaatctgttccatttcgatatgccttggtggctaatggaaaagggcggttgggagacacgcgaatcagttgatgcctttgcattctacgcaaaaactgcgtttgaattgtttggtgacttggttgatcgttggacgacttttaatgagcctatcgtgcatatcgaatgtggttacttaacgggctatcattatccagacattgttgacttcaagaaggctgttcaggttggctaccataccttgatggcgcatacagcagctgttgctgaatttagaaaagtgaagccggatggtcagatcggcattattttaaatatcacgccagcttacgctaagagtgatgcaccagaggatttaatggctaaacaaaatgctgacttactactcgctaagagttttctagacccaactgttttgggcgttattccagaagaattaattaacctcttaacaaaacatgagttattaccaatgacgaaaaaaggcgaccggcaattgattgccgatcattgtgtcgattttatcggcgtgaactactatcaaccaatgcgggttcaagcaccagagaatccgaagttcccagcacaaacaccggaagacttatatgctaattatatttggccagaacggaagattaatccatatcgtggatgggagatttatccagaagcattgtacgatgtggcaatgatgatgaaaaatgattatcacaacattccgtggtatgtttctgaaaacggaatgggtgttgccgatgaagaacgctttatgggtgaagatgggcaaattcaagatgactatcggattgaatttatgcaagaacatctgacgcaactacatcgtgcaattgaagccggcagcagttgttttggatatcatacttggaccttcaatgattgttggtcttggttaaatggttatcggaatcgttatggtttctactgtgttgatttggaccatgaggcaaagcgcacgatgaagaagagcggtcgatggtaccgtgaattgagcgagaataacggcttttaggccaaagaaaaagaaccgacgcatcagtcggttcttttttgagttaaaagatatctgtttggacatatttattgtgtaattcaaagaaatcataagtcgctaagttttcaatatccgcttcaccattgaagatggccgttgcagaaccagccaacatcaggttaattggtaaattatcacgaaaacgagcgagaatcactggtttattgtgggcaaaagcataaccacattcccacatggtaccggaatcaggttcgaattcgccttcttcagatttaaaatccataacagcgactacgacatctgcttggtcaatttgacgcgtatcaacattaaaagtagcgacttgccattcgaaagtaccgaattctgcatcaggataagggtgttggcctggtttgaaaagtgaatcagcatcaatcgttgggtttttaatgagtaaatcagccacttgatctaaccgatcgttttgttcggggctaaaaaatgggccagcgagataaacttgtttttttgagggcatgagagccgcctttctcgataatgttcgcgttttttgtagtaatttaagcttaaaaagctatttatttaattatatacgtacgaaaaataatattcaatatatgttctgcaaaaaaaaactgcttacgcagttttagtgaacgaacaagtaaataaccaatagaataaaggccacaactaagattgtgaacatgtaagttgaagcggtactaacagctttcttacgttcctttgatagtggtcggttcgctagtttcttgtattgcttcttagcaatttcaaattgacgtttatctttcatttgtatccctcgcttgtttcagtgtccctattatagcatggaatacagtggattgataattattgatgataagactggactttcaatctggaacaagctacgataatgctatattggagtataaggaagtaacaaatcatgaaattaaagacaactaaacaaacaactggacataaattatcagttgcagggattttgattacgatgggcgtcgtttacggtgatattggaacgtcgccattatatgttatgaaatcaattgttgaggggaatggcggtttggcaaacatcagccgcgattttatcatcggcagtatttcgcttgtcttttggacgttaatgttgatgacgaccgtcaagtacgtcatgattgcattgcgtgcggataataatggtgaaggtgggatttttgcactgtacactttgattcgtaagcaagctaagtggctcgtgattcccgcgattattggtggggcgacgttattagcggatgggatgttaacacctgctgtgacagtcacgacggcgattgaagggttaaagggtttgccaattaatgggaacgttttaattaataatcaagatcaggtgattttattgacggtctcgatcttatcggtcttatttttcattcagaaatttgggactgatctaatcggtaaatcttttggtcccattatgttaatttggtttacctttattggtggcattggtttggttaacttaatgggggatctaacgatgctcaaggcactcaatccgtattatgcgattgaactactgtttagccctgagaataaggtggggattctaattttaggcagtgttttcttggcaactacgggggctgaagcactttattcggatatggggcacgttgggcggttgaatatctatggtagttggccatacattgcgctttgtttagtgttgaattactttggacaaggtgtttggttattacaacataaagatattgcggcatatcaacatatttctgatttcaatccattctttgaagtgatgccagcccaattaaaggtcccagcgattttactggctacaattgcggcgattattgcatcacaagccttaatttcagggtcatataccttagtatcagaagcaatcaagttgcgcctcttaccacgaattaaggtcgattatccggctaagttaaaagggcaactctatatttcaatcgttaactggattctatgggcggtttgtttaatggttgttttctattttaagaactcagcgcacatggaagctgcctacggtttggcgattacgattacaatgttaatgacaactatcttgctattccattacttgggacgccgcgagaagaaatgggtattggcttatttggtactcatcttcttcgggacaattgaagttattttcttcatctcaagtgccgctaaattcatgcatggtggttacgtgacagtcttaattgcggcgtttattctatcgatcatgtttgtttggtatcgtagtaatacgattaaggaaagtaatactttcaaggcaagtacggtttcattactagcttataaacaacaactacatgatttgcgagacgatacagcgttagctatgtatacgactaatttggtttatctttcaaaaccacagaataaaccatatgaaaagaatatggttaagaagaatattctttattctattttggataaacgaccaaaacgggcgcaagtttactggtttgttgcggtcaatgttactgatgaaccgtatacggcagaatataccgcagatacgcttgggacggactacattgtcaacgttcagttgtatctaggctttaagatggaacaaaaagtgaacatctttattcgtcaaatcattcaagaaatgattcatcggggagaattaccagcacaaccacaacgctacacaacaattccaaatcggaacgttggcgatttctcgtttgtgatcatgcaagaagatttatcaccagcaactcaaattcgagcaatggataaagggattgttcaaatgcgtttatggttagaaaaattcactgatacaccggcttcatggtttggattggactatagtgatgtgttcgtggaacgtattccgctagttcttggccgccaaaaatcggtctctaagtatcatttaaaacgtcgtgaataacatcaataaattagtttataacgcctaggacagaagattgtcctaggcgttatttgtttaatagcagtcaagtaagcggtgtgcattacaattagcgcgggaattgccgtcattttgttacctgtttgtcatcaattgttatggttttgatatgtacaagcgaatataagatggtatattagtcccacgttaataaatcaaaacaacaaggagcacatctattacatgaaatcttttaagacattattgcttagcgctacattgacaacggctgcaacagcaggattacttttcgttggtcaatcaaaagcaagtgccgctactacttataccgttgcaactggggatacgttatcaacaatcgcccaaaaatttgccggtaacacagatttagtcaatcaaattgccacaacaaacaacattcaagatatcaacatgatttttgtcggggaacaattaacaatcgacactgaccaaacagcaacccctgttcaaacgacaacgccagtagttgttgcacaaccagccgctgttcaaacaccagcaccagttgttcaagcacaacctacagtgcaagctacaccagttcaacaaacagctgctgttgcaccgacaactagttcagcgaaagaatggattgcgcaaaaagaatctggtggttcatactcagcgcgtaacggtcaaatgattggccgttatcaattaaccgcatcatatttaaatggtgactattcagcagccaatcaagaccgcgtcgcagatcaatacgtaacaagtcgttacggttcatgggatgccgctaagagtttctggttaagtaacggttggtattaaaatttaaggttcctttaacgctcaatcaaatttaatttgattgagcgttttttgttctctgagaaatcacacttgactaaatcgaatgtatgttcgtataattaagaggacataagatgaattaaagaggtgtgcctgatgcatacgaataaagaagtgattacgctagatcaaacaggattgagtttatatttaaatggctttggagttttagaattgcggcgattagcggtgaatcatagtgatgatttgattgactcaatgaattattactacaaccgcgataagtttccgcaatttatttatcgtcatctatcagccgtcaccttgattgagattaatcggtggcaacgcgaattagatgaacaagtgcgtcagattcaagttggggtgaagagtcgtgtatgactatcagaatgaactacgccgcgtgattttaatgattgattcgaaatctttttacgcatcagtagaggccgttcggttgaaactgaatccgttaaaggctattttggtggtgatgtccacggagaaaaacacgggcagtggtttagtattggcagccagtcccatggctaagaaattatttggtatcagtaacgtaacgcgtgcccgggatgttccaattcatgataagcggttaatcattgagccacccaagatgaatttgtacatccaagtgaaccagaagattaaccgtatttttcagcaatttacggcagaagaagatattcaaccgtattccattgatgaatcgttacttgatgtcacggatagttggcaactctttggagcgacgccatacgaagtcgcacgtaaaattcagctggctgtaaaaaaagaaacgggcatttatttaacggtggggattggcgataatccgctacttgccaagctcgcattggatcttgaggccaaacggaatcacagtttgattgcagaatggcattatgaagatgtcccagataaactgtggccagtgacccagttagatgatgtctggtcaattgggcatcgtacggcagagaaactgaatcagaaacacattcattcgatgtacgatattgcgcatacaaatccctatcggttaaaacaagaaatgggtgtcatgggcgcgcagttgtttgcgtttagttgggggattgatcgggccgttgtacggcataaatataaggccaaagagaagtcttatgggaatagtcaggtattaccacgcgattattttatccaagctgagattgaagttgtgattcgggaaattgcagagcaagtggctgcacgtctcagggcgcatcacaaggcgaccacggttatcagtctggggattggcttttcatttgctgcaaaagaggatgcatcgcgtggtggttttgggcgttcaatgaagattgatgcgactaatgctaatcagcaactcacaaaacatgccatccaactttttcgtgaagaatggcaacacgaatcgattcggcatattagtattgcgtgcagcaatttggttgacgatagtgcggaacaattagatatgttcgacacacagtttattaatttgaaaaagcagaaattagatagcacggtcgatgaaattcgcaagcgctacggttttacatcggtggtcaaattgtctagcaaagtaaaaggtgcgactgcaattgagcgtgctggcttagtcggtgggcatgctggagggaacgcctatgaataatgatgaatatgatcccaatttggttaatcaatttttgaagtatgattattatgatcgtggcatgatgaaatggcaagggttctatttaagcgatcatacggcagtgttagataagaataaccgcgtacaagatcgtaagcgcaatgaaaaacacattgaggcgatgactgctgagatgattgctaataccatcaatgacgcaattgttaaatgttatccggttcaaatcgacaaagcagaacgttcaatagaaggtattgtacccagtaaggtggaaggtttaatcagtggctggtttggtagccaaataattgtggcaaatgaagccattttaatagaagaaatctacgcaataaaaaaactagccccctaactaaagcgtcaggaggctagcttttttacacgttttaaacaaacaaaaaagccgctaaaccttagtttaacggcttttctgggttctaggctgttttaaatatcacccgtacggtattcagcgatacagctatatcaatggtttaaggcggtaaggtcaaaataaagtcaaaggatttttggagcttattttttgattgaaataaccttgttttgattagaatgaattagatcattaccgaagtctgccataacgaattcatcgttttctgcagacattttgccgaaaacatgcccataagtacggtcgagttgtttgatggattgatgtccaagacgtttagcaatataccaagggtctctgtggcgatagatgaggagtgtggcgtgtgtatgtcgcatgccgtgcatattaacacgcttgatgtccaattgcttacaaagctcgtgaaggctcttattgcatgagtcattttttatatgcttaccttcgttggtcaggaataagtaaccatcgtcttctacaatatcatttgataacagcattctatgacgctgatcaattaattcatcgagatggtccatataaggacgagagagggcgataatgcggtcagcctttccattccccttagttggtgcagacttggcttgacgctccatccattggcgactaatagtcactgtgttttttctaaagttcaagtcgtcgattttgacgccacttatttcagagaaacgacagccagattggagtgcgaaaagtgcaagttccatgtataactttgagtattcagcattcttaaagaggtaatcaattaagacttgatagtcttcgtactccaagaacttcttatcagctgcgattggatcactgccagtaacctcgatgtgtgcgcagacatcacgagcaattataccgtcattaattgcgctggttactgtttggtgaagatgttgaaatagctttttagaagtcgtgattgcatgtttctcaccgaactcattcataaaacgttgtacatcagaacgggtgagtgcaactaacttcttgccataaaatgaacccttaatcttcttatacgaaccttcatagatttcaagtgtccgatcagatttaccacttttatacaaatcaatgaattcacgcatgtattcaggaaccgtgatgtcctgcttatcaagtgccattcctgaccgttctttttgtttccattccttctcgaaatcttcgactatgtatttactcttagccgtttttttcttgattttgtattcaccatctactttgacagatacgcgtgcttgccacttaccattttctaatttacgaatactcatttcaatcactccattttctgctataatagagtacgcaaatggcgcacattattatgcggtatttatgctaagcacatccactagcttgctggcgggggatgtgctttttattatgcaattaatgcttacattatgatataatcctatgcgaagggagtgaacatcatgctgaagaaaatttggtcgaataatcgtgcacttaagcaagaagttaatcaagagcagaagagaataagacaagagttcttaaaagcaaaagatgaacacaaagttcaagcagcaagagttaaaaaggaatttagtaaaatataaattattcaaaatacaaggcgattggtttaacgaccatatcgcctttttctgttaagttcattgcctctaacatagtatcttgaaatgcgacattgaaatagccgatagtctttatgctttcttctaattttgcaccgagagcatccatctctcgttgcccattgttaacaattgagtcaacaataccaaccattgtgatttttctggatgttccaaaaaatgttgtgagttgacctatttttgatcgcagatttgagttttctagaagagagacgctattatttattttaacaactgtggagtctggcaagaaattctccatcattgatccaaaggaaacaatgtttttaaaatttttcttattttctcttaaatcgtctcttgtcatttctttatttgtgaaacgcataacgtcaattaaggtatctacatcaatattctttagtagctcaggggtaaatatatcaaatgtacccgttattttgataagtttaccttcttctgttgttttggagaacaatgaatttgtctcagctttttgaagcagtctgtttaattgataatctttaaaataaatattaatggattcacttactgcttcattttgtgattcggttgcagttagctctgaatcaataccaattttggcgccaaaattaactccagcattagcagattgttttgttcccttaaccttgtcactaccagacgatgaatttgtttgttttgaatctatgacaccttgatctagttgtgctaatatcgaatttaattcaattgagtctaggtaaataatttctttatagttaaattctgtcatgatactcctccagtttctgctataatagtgtacgcataatggcgcacgtttttatgcggtatttttgcaaagcgcatccttcgctggccaaagtgaagggatgtgcttttttcatttctatataaagcgtccctaatttatatatgctataattgcacttaaagaggggagatatgataactgtggataaaataaaagtagttaaaaaaagaattccagttgaagcatatcaagctaaaaaacctactgatatagtaacattagagggcacgatgcatgccaacaccgatgactggattataaccggagtcgatggagaacagtggcccgtaaaaagagaaatcttcgagaagacatatgacattattcaataatgtcatatgttttttattttggatatacctttattttattccgtattgggtcctcgcgtttatcgaaggccttttgtatatagtaacttgactgcctaataaaatcgtcccatttgactagaatgcagtatctatcttcttcattccaagcacatttattgtttggaagataatagttatagttaaattctcggatggtaatatcgttatcaaccttcacataaccatgcgaattaccacaggtagagcatgtgtagttacccttataaattttgtcgtacatttcagggaggacaattccgacaatgccatttggcttactgtatagagatgcttgaagttctcttttaatataattttgattctcaaaaaagttattttcagcactatgcgtgccaattaatacaagtgtgactgttgaatcctgtaagtaatcacggcgaagcacttgcattatataatcttcgtcgtacgaatttatgggattatttaaggatttgtctataatatctaaagcgtatttattctgtaaagcatccttgtattgctgatcttctgtcttgaatgagataaaacatttatgcttcatttgccacgccccttattattattgcccatgtttgcccaattgatattttcactagaaatgattgtttcgcagcgttcaaccaatgttttaaactcatcagtattggcagcatcataaacacctgcggaagcttcgaacatatacttctcgcgtttcagagattcagagattgtacgatattgaatccatttttcgtgaaatttcataactgatgatatgccttcgagaacagtgacgagaccgcctaagacaccaataagccgaagtgcccaatgaaagtcgattacaaaagatgttaaaactgggatacttgccgaaaatatcacttgtaatattttaattgcataataccatttcttttcgtgaccgcttttttcgtcgtaccaatcaatttgattattaaggcgttcatctctataagtacaataatcaatgtagccatttttttcagcttccattaagtcactcctacaaatctatttaaattctgctacaccaccagcaccgacaacgtcactaccagttgattgatctgatacattgattttgaaagttgataagtcgattggctttgcagaaattaaatagaaggttccgctagtgctaattcctggatttacattgccgtttgagttttgatcaaagccgtattctgtgctggattccatgttaaattcattaccagctgcatcgataacatttgcttggtaatatccaagcccgaaagcctttgaaccaacatttttaagcttatagttaatagctgctctgtaataatgtgagggtagggacttgacgtctggcatattgtattctgcgtttgtgtagtttgcctttttattactgattcttttattactgatttttgtaatagtatactgagtagaacccacaaccgttgaaaccttgttctcttgcttcttactttctttatttgcgctctcggaggttgcttttaattcagctttcaacgaactattttctgactttaattttgaaacctctgatgattcattgttaccgcacccagctagtgctaatgcactaaatgtaacaacacctaaacctaataattttttcacaataactcctccaagtatgttaatatatagtcgtggagttgctattccattattttttactcggagtagtacttatataactgcgtcttacttcccccaagaagtagggcgctttttttatgcattgagaatctgaatgccgttggttaaattgattaacatacccttataagtaaagatattgccacgtttaacacgataatgttcaattgcttcatctaaaaattttggagtgacatccaaaaggtcggcgagttcaaattcatttgaagcacaccattgaagtgcaataagatcgttgagattaactaaacgttcgtaagctaaaccgcgagctttgttctcttgtttaacatcttgaaatgttttttgatcaataatatttccaacactggtttcttgatgcgcaacttcttcagctaaattttggagttgctctttacgtgattttcggttgtttaaccaaattgtctgcccgtcacatagcccaccaagtttatttggtaattgattgctgtactcaatcttgtatttgatgctggtttcagttagcaaagtatcaagtctatccataaaaacaccttatttcttacgattcttgatatagtcgataaaattcattatttctttgatgtcttcttcggttgcatcatcgtcaatgtgagctgctagaagtgataaatttgaatcatcgtcagcttcttgcttttcgcgtccaagtaaataatcaattgatacgtcaaaataatcagcaactttttgtattttgtctatgccaggtgtctgcgtctgccatctacgaatagtaccgttgccgaagccgagcttttcttcaagactacggattgaaaaaccgtgctcacgagcgagtaatttaatacgatcgtacatatccataattttctcctaattatgaacgtatactaataatcgcaaaaaaaacgtgttttgagttgactttgagattattagtatatatactgtgttcataagctaatgaatttagctaataagcgtacaaaaaatagactataagattgctccccagcatttatagatttgtcgcttatttgctatgccttgataatagcatattggtataaaagtgtaaatgtttagcttaaaattttagcaaataatctaaggagggcgatttcatggataaatcattggcaaagcaaatcagaatcaaactgatcgaaagagattggaatctttcaaatttagcaaattcactaaatttatcaacagcttacgtatcagatatcttgaacggtaagaaagatggtccaaaagcacaagagcatattcaaacgatgattcagattctcgatattaagcaggcaactcattaattaatttttccaaaaatcgaagttgctgcattaatcataagtgggaggtgattagaaatgaatatccagcaagcaacgaaaattgccacaaaacaaaaaagaggcatcacacgaaaatcgtgggggcctcgtagtgtaacgatattaccaacaaataccgctaatggctgcttattactttttttcggtcgaaagcatgaagtcaaaagcaactgggaaccaacagcattagatttattggcaaatgattgggaagttcagggttagatgaatggaattaatcctttgattttagtggcatacatttttgagagtagtaattttgcatcggtggttaagttgaaatcagcaatagtcattttaagaaccacctttctaaggtgagtataagcaaatgtgtcgattttatcaaacgcaataggaggtgaatcggggatgcacaacgagctagatgaattagtaagtgattttgatcggaaactagatggatttatttctaaagaattgaaaaaagctcaaacacatcaagaagtaatcaacaaattactgcaagaaaagtttgagctaaatgaaacgaaacgcgttgttatagatttggccatcagaaagatagagcgattatctttaagagcctagtcctcaatagttatcttaatgactgatttacagttgtaccacgactctttaccttcaatttggaaaaaatctgttttacctaagacaccacatattccaagatacgggtcagaggttccaaatgaagttgagctagcggaaatattatcgaaagaattctcaactgctagttgcatgtaaaaaacgtctctgttcggttcattctcaggggctaaagaattagcagctctaaaaattgtagattgatcaaaagtcaaaacttcgttgttttgcatggttaatctaaattgcattgaaatcaccacctttctaaggtgagtataagcaaatgtgattatttcatcaaatggaaaaaggagaggccctaaatggatattgaaactaaggtaacgctcgacaatataaaaaaattattacccgctggtttcgtcattataccagctaataaaccggaaatagtcgaatcaccacaatggaatctgaaagaattatgtagatacatgcaacgtcgtgaagattgggttcgtcggaaattcttaatgccacatcgccgatttttagaagaagcaaacggcggaccggttcatttttcaacaggtagtggcagtccttggcggattaacgttgcggagattaagaaatacattgaaacgcattatgacgatatttattaaaacgtacatttaaacatcaaatcagtgcgtcatcgcggctgctgagggagtctctagaattactcctttaaatccaatattcctccaagattattgaatacagccgattcagccaaaactactacttgaattaaccctcagtagtcgcgatgacgcactgatcaagtttagagaggagcaccaccatgaaaaaacatttttacctagccatcatgatcagcatcattttaggattgtacattccaaaggacctgcaatttgcagtaaccatcatgattatcagttcagtcgtaacctacattgggcttaatcatgaagaatttttcccagcgaagggaggtgacgataatgaatgattctaatcacttggtcatcatgcatgagcaacaagcggtgacaacaagcttgcaagttgccgacgcatttggcaagcaacacaagcatgtgattgaagcaattgaatcgaaattgagtacagccgaaaattcggccctactcgaaatgttccaggaatcaacctaccaggcacgcaatgggaagttgaacaagatgtattacatgaaccgagatggtttcacttttattgcgatgggcttcactggtcaaaaagcggacggcttcaagttgaagtacatttcagcatttaaccagatggaaaaatcggttaaggcaccaatgcaactcccttcaacgccgcaagaaatgcttgctctcgtattgaccaatgtcaacgattcaaatgcagaagttaagcgattaggtgatcggatggatagctacgaggataacatgccgttatcacccggcgaatatagcttcttatcacgaaggattagacagcgagttggcgaagttgctcgggcatttggtcaactatcagctaaacaacgtgggcaattattccgcgacatcaacaccggcattaaacaggtggcgggtgtcgataccagatcgcaactacgagataagcactacaaaccagttatggacttcattaatgattgggaaccatcaacagcaaccaagacggttctacgtcaatacattgctgaagccgaataaaaatgacgaccaaagttaaacataggtcgtcagattgagagttttatattgaatattaggagcgtgccaattatgacagatagcgcaaatcaaattaagaaaccgcaagacattgtttatagagcaaaggcggaatatgccgagatgattgccatcaatatccgcaaagacattgcaagccagttcgggttaccagctgacgttgaagtcggtggctatccgggggatgaagttcgaccaatcaagattcattattttggcagcgacaacgaaatgcaacgtttaacgaaatacatcgacgctcattattgttttggtgttgaaccagggtttcaaaattgaacgaaaaaaatagcccttaacacaaggtcgaggactaaacaatataactttaactggtacttaaagtatagcacatattgtttagtcagtaaacggaaggcggctgagagagccgtttaacggccttgtataaggtattatctttctgacgaaggcaaggtgtgaagaaatgtttattcgagagaacaggacggtttgtgatgactacatggaagtggacatcatacccagaactttgacagcagaaaatgtggccagcagatcccgtagaggaaaaaagcagaaggtcagcagacctgctcaagataaattgaatgataaaaatgctaagcgttatttattagagctacttaatggcaattttacagatgatgacttaatggtgaccgtgacctactcagataaatatttgccatccacaccagatgcagcgaataagtgtgccagaaattatttacgcagattagaatatcgccggaaaaagttaggactggatccattgaagtatattttgacaaccgagtatgacatggacgaaaacaacgagtacacactgcgagttcatcaccatattgttatgaatggtgggcttgacagggatgaagtggaaagtatttggtcccagcgcattaagggcactagcaagtatgaaccaatggggcgtgctaatacacgtagactccaagctgatgatttagggtaccaggatctaacgaattatttaaccaagcaacctaaacgtaaaaagcgctggtcggcttcacggaatttagtgacgcctgagcgtttacctaaaagagattttaaatttaggcctcgccgtcttgaacgggaaattaacacacctgatcaagggcgcgaatactttgaaaagaaatatccggactacaacatcgtggatgtcacggtgaaatattatgaaatgacagggtggcacgtctatttgaagatgtggcgccgagttgggaggatgaacagatgatgtataacacgatgtttggagcaccaattgagcagttcgatggctcgcagaagatgattgataagtatggcattcatttaagccaaagtgttatgtggtgggttccaaccattttcagtttgttggagtttaatacacgttattcaaagctagaaattggcgattggattgtcgatctaggcgaagaaggttttgcaatcgtcggggatgagcgatccaaagaattaatccaaaaagcacgcaaggaggaaccaatgcatgtcacctttaaaacaacaagcactcgcaaagatgctggtcgaaatgaatgaggagcactcgtctgcggtcgaccaaatacacaactggatttgcaaccaagatgacgaagatttattgaatggcgttatggctgaagacaagaccattaaccgagcaatgaaatattgtcgcgataaggcaaaggagtctgctaaagatggtgtggccatgattgaagacgccactgtctatgggtgggttaaggaatacttcactacgccagatttagcaattgataaaccagcagctgaattcacgcacgagacggtagaggtgccggatagactacgcaatccagtaacggataaaccagaaccagctggggatgcaaccgaaccggaagtcccagccaaaaaggtaggtgagcaacttgacatcttcgattatctcggcgaataaaaagccaatcgattacgttaacaatcgtctcaaaccaccaaagtcattctttgagtggtgctaccgatcgatgcgcacttatgtctggtcgaacaaggagcagaccattgtcgcatctgaacgcaagcattataacgtgattaaaaaaaggttgaccaagaaatcgcgactcacattctatgaccgtagggactgtttcatgattgtgctagcgacatctagacgaatcgaacttcagacgtataaggtggcgtcatactttgacaatggcaagcaacggtttgaaaccgagctgtttaatctagaagtgtttgccaatgaccagcatgttaaagttgggcatttctatccagagtacggattcgggttgaaacagacaatggggccatttagcaagatttatcctgaagtgttcgataaggaacattggaccaaaaggctcaacaaatcagaactacggtacatcaggttaaaagataacatgtggccagaattgctaagggatgtctataagcgccgggggaagattgaattcttgcaaaagattaaagctaatgaatttgctgatcaacttattttccatgattgccagatcgatatgcgcaaaattactgatacgtttttgagggaaacaaagtcgttttttagaaactcaaactataagtatgacgactactttttaaaacttgcgattgaaaaacatggtggcaagatggtacccggtattgagcaatttttaagtgccgataaagtagaacaactgccagatactgtgggcattgtcaaaatgcagaactatttaatcaaacaggcgacaggtttctaccagtatcgcgattacatcaacatgctcaaagagctagacctaccactaaacaaatcaaacgtattacccaagaatttgactgaagcgcatgacaaagcagtcgaagcattgaatgcaattaagcgtgaagttgtccgttctgagttcgaagagcgcgcgaaggagatgcagcaacttgaaacgacaatcggaccgtatgcatttgtcttacccaaaactgcggacgatctcatccaggaaggtaatgcattgcaccattgcgttggtggcatgcattacatcaatcaatatgccgataagaagacgacaatcgtgtttgtcaggccaaaagaatcaccagatgaaccgaagtatactgccgaagtgaaagacggtaacatcatccaaattcaagggatgtttaaccaggcaccaatatcagatgaattacgaacagcagtcaaacagtggcttaataaagcaaataaaatgaaggtggcgaattaatgttaacgaatgaagttttatccaaagcaccacatgcattcacgattgtgtgcatgcatcagcacgtagcaattgagtggggcgcattcctgtataagagccggacaatggcccaagcagaatgcgacgcgctcaatgaagcggatgaccagttgaaccaggcagggcattggcaagtgattgaatatggacggccgatgtttgttagtgggagtgaagaacatgcttaaattcagttcgaaattatggcaacagcatcatcgtggcctattgcctaagtcgcaccaggtagtacttgacggcttgccagtaactaaggcacatgatggtaattaccagattgacgaatatacaacaacagacggacagaaatgggaactctatccgatttatgaaacggattgcgttgatgatattagtttgtttgataaggaggttacatcatgacaccactatggtttttaaccgatgccggcaaccactttattatgttcgtcatggccgcagcactcaccgcaatttttatcacgttcatgtattttgcaatcacagaaaagcggtgatcacatgtacaaattgattggtgctaaaactgaaacagaatacgccagcgatgaatataaggaactgctccaccaatacatgcagctacgttggccaacaagacaattactcaactcacgaaaaaagggcggcgcaatgaagcgcatgcctgaaccaatgaagattataaaagtggaggaagactaatgaatgaatttgaacgaacaaaagcactgtatcatgacctatacagattagatactaaagatgggaaggtaattgcatcagattttaacttacctaatttcgttagaaaaagagctgcttacttcataaatattgaagaaataagttttctcaacatggttaatgacatattggcatatgacgagacgaacattgcgagtcaatattcatttattggcgattggttaccgacaactaaggaatttagagagtggcgtgatggtttaccagtcaatgggctagaaatgttaatggcatcttatctgatatatggaaaacaatatgtagatcagggggaagattaatgactaaaggaactatcgtctgtctaaccaattacagcgtcgcaggtcgcatcattgatattcaaccagatgggctagtgattcaagatgaccttgaccgccaatatttctgccttgagtcagaattaacgccaattaccgaatcagaaaggatgcgtttatatgatagatcgcggcattgaactcgttgctgagcatctgatgtccggccaacgaatcacggtttatgacattcagcgccactttaagctgaataagagggatgcagcagcgctacttgaacgggcacaaaattatgtagaagaccgcaccattgaacggcaatcacgcaaacaagccgacatgattgctaagcgaaaagctgaacgacacttcaaccaatcaggcgggacggcatcccgccggcggaggttttaaatgaataaccgactaaaacgtgcactacgatcagttaagcgagaaagaccattgctatatcaattatattggatagcaagaaaagcaagtcaatcaagtttatcgactgaagaagtagcttcagcgattgcgataatgagcaacacacctacaccaattcggtataagtggcataagcgcaataatgggtggaaatagcatgaataacagataccgtcgcctagttcatacaatgatgaaagagcgtcccggcgcatatttatttgtggtaggtcgtcgaacggcgcagaaaacgggtcgaactttaaaggaagttatgaacgcaattcggcttggcagtaaccacaccaacataaagcccaataagtggcataaacaaaataagaggtggaaataatgaaaaaacgtcaacatcggaagctccataagcaattagtcaaattcatgcaccagaatggttttgcaatcgtcgacaccaacatgatggatagacgggcagaacgtattattaatggcacaagatgggaaacaattgaattccggccgggtgagtatgaaggtatgtcattaaggctggagggaacttacatgggtgacatcaatgttttaaaccgaattaataaccgagtgtcagcgcgtagataatatccagcaattaggagtgatttgatgggaattgatttaaaaggactagatgatcaacaactggccgccattacaaaggcggtatacaaagaacagaacaaagctaagcgaaaggagcgtgaccgccgtttacggaatactaaaatgttattacagaactaccgccgtttgaggacacatatccaaatcgaacctggaaatgaagagctgactcttaagtatgaacgggaaaacggcgaagttatccggttcgatgagctagacaagtatcacgctaagtcgcggtcattgctcaaatatctcgacaacatattggccgtctacaaagctgagtgcaagcagggagatgagattgattggcgtcgctatcaggtgattgacaagttgtacttatccacaaccaaattaagtttaagtgagattgcgctcttttacgataaggataggtcgacaatcgacagcgacaaacggcgggctatcaacgatataagcgtcatgctgtacggaatggatgcgttaaatgacatcattcaaagttggtaatatcgcgcccaaatcgtccccacattccccacatttaaaatggtaatatgatagcatgggatatttagttgaggaataatcccgacaaaacagttagtcaacatcgcgtgggtctcgccagaaatggcgggacttttttagtatctcaacacgttacggtggcggaataggtagacgcgggtcattagccctaatgatttggcaattgtgcggtgcaaatccacacccgtaacattcaactgagccggcttaatcgccggcttatttttgtgcaatcaattaaggaggaatcgcaatgaaagtaacatatgtagaagcagcagacacttgggtaatcggaaacgtagcagaaagagaaatgagtagcgccaatttaatggccaatagatataacggattcgggattaaaacaatcgttgttccggacggatttgaagttatgcgaaaatatcggcatgaaaaacaaagacctactgacggtaatattcagacatacaaaacagtagttggctctccaatcgagaacccaaagattgccaatgatttacggctgatcacgggtgtgttagatgacgccaaagaatatgaaagcatcttcgtattgattgatggggacagattcgagacagatcttgaagcgttatgtactgcattacaattgcttggacttggttgcgacatccgtaaaaatgataagggaacccgagcactacaaatatttaataaggaaggaatcaacctatgaaagtcagaaatatcttaaccgctaacgtcacatcaaaagcaggcactgaggatcaatacaagttaaacattccaaagaacaccacagtcaatgagcttgagttcgtgttgatccgcaccatgtactttatggtatgtaactacgctgaaattaacaacctaccattcgaaacagcgctcgaacaatacgtacgcgcggttatggttcaggtcggtgtgatgaaggacttatcagatggcgaagcctagtaagttaaccttcatcaatggcaagccaacactggtgccatttgaccaggtgacacgcaaggataacgacaaagcatacaatcaggcacgaggtatgcagcaggatgagtaccttggcttttaccacagtaccgaatggacgcacatgcgtgacgctatcaggcaacgcgaccttgggttatgccagcgttgtggcatggagttgaacctcattgatcacattgtgccgagcaaggatgattgggacgacagactgaaccctgacaacctgcaggcactgtgcactgaatgccacaggctcaagactaaacgggaatgggtcaagcacaataaaggagctgagcgttacatgtcaatcaatatagtgtgtggcttgcctggttcaggtaagacaacatacgttataaaccgtaaggctaagcacgacctgatctatgactatgatgcactgatgcagtcactcactggcttgcctagccacgagaagaacttcgatgtgcatgactacatcatcctgtttttcgagcagatgttgcgcaagctgaagagtgaacagaccttcgataacgtttggatcattcagacttacccagacgagcgactcgatggactgctcagtccttaccatcacatcaaccatctgttacttgatacagacaagcaaacctgcattgacagactgaaacaagataaaagattcaatcaaactttaacaaaagttttcaacgaatttgaaaataaaaattttgaaaacttcaaacgcataagagaatagccggaagcccccttgtctttttaacgggggttacttagaggatgtctgcttaacgtacgtcctctttttcgcgtcccaaattctatctattttttacgcgtctggggtgagtcgtgcccatttttgcataaaaggagggatttgtgggtatgggaagaaaacaaaaattattgtctcaatcaaaaggcaatttgaccgttttgcaacaagaagctaagtataaagctgagttcaacgctgccgacggtttgccaaatttacaaaaaacaccacctaagcatctcgattcggtggccaaaaatgaatataaacgaatcataaattcactcggaaacctaccacttagaaatctggatcgagtcgaacttgagacgtactgttcatggtattcaatttataaaagtgagtcgatgaagttacagaaaatcgccaaccaaattcctgcattagagaaaaatttggaagtggcttatgaagaattgcagcaggcacaactaatggatagcactgagatgattaaggaagccaaaataaattacggtaacgctaacggctgggttgaagatgctgaatttaaacgggatcgtgccattagccatctggataaagccaccaagaacattaaggggttagccagtgacctagggctcaatgtcaactcacgtatgcaaatgaatatgcctaaagatgaagagaaaacgaactcactgaaagggatgtttagttaatgtatttagaaatcgtgttatgtctaagtcagtacgatgcttcagcagctgtagtccaattgcatagcagaatagttgaaagtggcggtattgcaaaattatcgagaacaaacaacgaagtaacaatcggaccaaacaggacttatcgtttcatttcagtaaatactagaaaagaaattgttggtttgaaactacatctatcagaagcgctttggcagagctgttcaaaagatgaagaattatatcgacgtgttgccaaaacaacgcgtgaagcctgcgagaaatggcgagaactaaggaagattaagaatgatatttactgatccaatgccatcatttaatccgcgtattattgacgggtcgttgctctgctcgcaatgggtactgttggcggtcaaacgtcatgaagcggatttgctccgggatgattgggaatggacgtacgacgaggagttggctggcaaagcagtcgcctttatggaaatgttgcccgaacctaaaacgggtaagccccaacctttagcgccatttcaaaagtttattatcggctcaatatacggttgggtcagcaaaaaagataagtcaatcaggcgatttaccgatgcgttcatttcgatggcacgtaaaaatggtaagtcgcttttaatttctgggattgttttatacgagttcttatttggtaaaaatccagcatttaaacgtcaactctatacggctgctaatgaccggaaacaagccggaatcgtcttcaacatggttaaggaccgactcaaagcactctgtcggcaagatgatgatattaaacgcatggtaaaaatcacgcgtgatgagattatcaacacagaagatggctcgattgtgcgggccttctctcgtgatgccgggttagtcgatgggtacgaaccgcacgttgctgttgtcgatgaatacgccaatgctaagagtaccgatatgctggaaacattgtcttcaggacaattgctattacctagctatttgacatttattatttcgacagccggttttgatatgaatgcaccgatgttcgttcagaattatccgtatgctaaaaaagtcttattgggtgaaattgtcgctgatcgttattttgcatttattgctgaacaaaatgatatttcagaaattgataagccagagacctgggtgcgttccaacccactgattgatgttcctgaattaaaagatcagatcaccaactatttaactgagaagttgaagcaagctcgtggggatggttctttaaatgctaagttgatcaagaactttaatatgtggcgccaagcggctgagaattcctacatggatgtcgaccattggaatgccgctaaaattaagccaatcgatattagtggcaaaaaagcctggattgggattgatgttgggaagacatctgatttatacgctattagttggctaatccctatggagggctactggtacgctgattcatttgcatttgtcggcactaaatacggactggatgccaagataaaatctgaccgaatggattatcgtcgcctgcaggagattggccagtgtaaaattaccgatcttgaatcaggtgttattgacgttgaagaagtttatcgctggttggatgcgtttgttggtgagaacgatttggacgtgcaatccatttgttttgacccagcacaatacggcacattattgacacagattgaaaagggccatccagaatgggcacaagttgccgttcgccaagggacattgaccttatcaatgccgactaagcagtttaaagatgacgtattagagatgcgggttaaacacagtggtaacgagattttaacagcagcgattaataacgctgttttattatccgataacaacggtgtccggatcgataagaataaatatagcaacaaaattgatgccttagacgcgttactggatgcatatgcgatttgctttagacaaaatattgagaccatcacgaatgatgatgtctttagtgatgagtttggattttaggaggtgagctattgaataaaaaattgaaactaatttggaaatggctgcagttaaatatagcagtcattattatgctggtcggtatggcgcttattgctatagcggccttttttgttggcatcggggttggcctattggtaactggggtgcttttgattgtcgtctcagtgctggcggaaagggggtgataaccaatgccattatttagaagccttgatcaacgagattgggcgggcgacttaattgctgacgggattatcccagggatgtcaagcggcagttacactggcgtttcagcattaagaaattcagatgtgctaactgcggtgtctcatattgcgtctaatgtcgccagattcccatacgttattaaggatgagaagaccggcgatgtaattgatgaagatgatttatcctacttgattaataaaaaggtaaatgaaaatctagacggctaccattggaaatttattatgacggtcaatgggattttatccggagacagcttttcaagaattgtgcgggatccattagatgggaaacctgcattaattgagttctacttgccaagtgagacgtatgtcaatgacacggacaagaaaaatctgaagtatgaattcacatctagaaacacattgaaaaccatcatagaaccgcctgaaaatgtgattcactggaagtttttcacgtatgacggtattcacggccggtcaccgctgttgagtttaggggatgaaatcggactgcaggagtcaggcatcagcactctgaagaagtttttcaagagtggtttaaaaggctcaatcctgaaggctaaaggtaaattgaacaaggagtcgcgcaaaaaggttcgtgaagatttcgagtttgcacaggaaggtgcgactggcggttcgccggttgtcgtagatgacaccgtggactaccaatcacttgaagttgacaccaacgtcctgcagctgatcaattcgaacaattattcaacagcgcagattgctaaagcgttgcatgtgccagcttataagttggccgtcaacagccctaatcaatcgattaaacagttgaatgaagatttcattaagtccgatttgccgtattactttcagccaatcacgtccgaattgcaattgaagttgtttgacgatgatcagcgcagaaaatacgtgttcgaagttgattcacgtagggaaacaggttggtcagttgatgatgctaagaaggcagttgaaggtggtctgattacaccgaaccaggcacttacgttaattggacaaccaacatcagatgacccgaacatggatcgttttatttcgagcttgaatttcgttcataccgacatgaaggacgagtatcaacggttgagtgccatgaagggaggtgataagaatgacaatcgatttggaaaaacgtcaagtgacaacgacgatcaatctaagacagattgaagattcagacgaacaagtaatcgaaggatacgcgttgaagttcaacaaggagtccagcatcttgggtagtttctacatgaaattcagagaattaattgacgctcatgcacttgatggaactgagatgaatgatgttgttgcgaccttcaatcatgaccagaaccaagtcctaggtcgtgcaaatgtcaatcttgaattgacggttgacaacattggcttgaagttccgtgttaagccaacagacacccaatatgcgcgtgatttaatcgccaatattaaggccggtgttattaatcaatgtagttttgcatttacgattccggacgaagatggtgctgaagaatgggttaactctgatgaagaaggcgttgactatgttcgtacaatcatgcgaattgatcatctctatgatgtatcagtcgtgaccacgccagcttatccggacactgaagcaacagtcggtgcccgtagtaagaagttagtcgaagaattacgcaaagaccctaagtgggagactgaaaaacggaacctacttatggaattggataaggaacaactactagaagacatctaaccaggtgtctattttttatgccaaaaatggcggaaaggagtcattacatgactttagatgaaaaattaaaagcacttcgcgtcaaattagacgaaaatcgctcaaaagtgccagggttaaaaactgaaattcggggcttggttgagaaagccgaaactgaagaagaattaaaagcggcacaggctaagcgatcagcgttagaaaaattgaatgaagaaatacgaaaggacgaagcaactgaagcgctctatgttgaagcgattgaagggaatcccgtacctgcacaacgtcacaatgaaaacaatgccaatcaagaattacgaaattcaatcaacgcatttattcgcagcaaagggaagaaaacagaaggtttaacattccgtgataacgaagtagttgttccaggcgaaatgcttcgtgctggcgaaacacctacagcaggcattacaagtacagacgcagaacctgtgatcccggtagccgttagctattcaccacaacgcgaattacaaacggttattgacttgaaacaattcgctaatgtctttgcggcaactaccgcgtctggtaagtacccaatgcttaaaaatgtaaaagctgtcttaaactcagttgctgaattagaagaaaatcctgatttaatcaaaccagatttcgacaaagtggactgggaagtacaaacatatcgtggtgcaatcccattatcacaagaatcaattgatgatgctgaaattgacttaatcggaatcgtggcagaaaatgccaaccaacaaaaattaaatacaaccaaccaagcgattgctggcgtattgaagacctttacagtcaaaacaacagcaacacttgatgacttgaagcacattattaatgttgatattgaccctgcttacacaaaagcattggtcacgtcacaaagctactacaactggttagacacattaaaagatggcaatggtcgttatttaatgcaagattcaatcatttcgccaagtggcaaaacggtattagggatgccagtcttcgtagttgctgatacaacatttggtgctgcaggcgaagcgcatgcatttattggggatgtcaaacgtgcagtattatttgctaaccgtgccgacatcacgattacatgggctaaaaatgaaatttacggccaatacttgcaagttgctacccgatttgatgcagaagcggctgataaacaagccggtttcttcttaactcaaagtgattccccaaaacagtaaccggcgttgcgttggaccagacgaccttagcgcttaaagttggtgaaactgccacgttaagcgccacagtcacacctgatgatgcagctaataagacaattgcattcacaacgtcggacgaagcaaccgcaactgtaacacctaaagccgggaaggttactgcgataaaagcaggcaccgccacggtaaccgtaacaactgaagatggtggcaagacagccgaatgtgttgtaactgtcaccgaatagtaggtgattagatggctgaaaaagaaccacttttgcaatcagcaaaattagaaatcctcaagaattactgcaaaatcgaccagagctttgataatgatttattagagtcgttggtcgatgcatcagcacttgaattagcacgggcaattaaatcagattcagaaccgacggagttcatcgacgaacctcgtttttttattgccctgatgaagcaggtcaaagaggattactaccaacgtggcttgacagcggacagttaccgcccagttctggccactaccgtttatggcatcatcaatcaattacgagccgagcagggggatggaaataatgaaaacaactaacatgaatgagcgcattaccttctattccgttggcccaggcattactgaagatggtgtctcaatcgataaaacagagacgatggagttcacagtgtgggctgaagtaccgaaattaccgattcgagagttcgtcaatcaaggcaacaaggttggctaccgcaaagagtcaccggtctttattattgcgttcaaaacgcagaaagaaatccagaccgattggcggattaagtggcgcaacaaactctatgaaatcaagtctctggatcctgattaccggacaagggacattattcagatttcaactcaggaggtggtcatgtgaccgttgaaggtgaagcggcaatgctattggcagtcgataacctaaccaagggttttgaccgccgagcacggcgcgctgttaaagaaggcggcgaagtgttcgcggatattctaaagaaaaacacgccagtctcggaagaagataaaacgggtaagggcccacttgctgagcatgtcaaagtgacgggtgtttccgtcaagtctggggactatgaagtgggtgtcggttacgacaaagaaaaaggtcgaattgctcacttcccaaacagtggaacgtctaaacaaaatccacagcatttcattgaagaatctcagcaagaagcgcgtggccctgttcttgaagcattcgttaaaaatctgaaagagggtgtctagatgtcaccagaagtgaagattcgcaatctattaaatgccaacaccgatattgtggcattgatggacaagattcgcggccgtcctttagattacccgccggtattcgtgaacaccccaacggacaagtttttcgcgtccaatcttgagattgcaccctggattcgggtcacattagtccccggtgacggggccgattatgccgacgacaatcggctgattgaatatccgcgtgttcaagtagatttctggatccgtaaggaaatgaccaaagagctcagcgaacttgaagatttaatctatgagacgctgcacgctaacaattatgagcgttactacaagagccacacaccagacgccgacattgaatcgctgatgatggtgcaaggcaactttgaaggcttcgaaatttgaagccttttttatgtacacaaattaggaggaatacgtaatggcagatgaaaaagcaaagaaattagtaaaattcggggttagcggcttcgaatatggggtcgttgatgactctgaattagtaccaacatctcggaaagtaccggggttggtatcaatcaaaatggatttaaaaaatgaattgaaaacattcgcagccgatgatggtccttaccttatcttgtcgggtgggattacagaagcaacggaagcgattgaagtagccgacatcgattcaaccatgaagaaagatttttatggcattcgtgttgtagggggcacagaagtctattctaagaatttaacgcctaatgatgtggcgacattgttccgaactcaaatgagtaacggaaaatacgtctgggttgccatgttgaaaggtaaattctcattaccatcaatggaccaaaagacagtcgatggcactcctgatccagccgcagattcgatcgaagggtcattcgtccctcgaggggattccgataacggcaatgttgtattgattggccgtgaagataatgaaggcttcgactttgatcaattccacaaatgggtattcccaacgactgaagctgaaggcgaaattccggacgaagacgcaaaaaaagcgtaacgggagtcagtcttaacaagacaaccaccagcattaaagttggtgcgactgaaacattaacaccatctgtcactcccacagatgccacagacaagacgggtaagtggaccaccgacaaaacagcgattgccactgttgacaacaacggcaaggtaaccgcggttgctgaaggcacggccaatattacctttaccacaacggacggcagttttaccgccaaatgtgcggtaaccgtcacagcagcttagttcgaattaatcaacagagacgtaaacggagtgagacgatgggcccttttttaaagggctcttttttattttgaggaggaattttcatgtacgaaattgagctgattattgatcacgaaaaaaagaagttcaaccgcaatgagccaccaatgttgcgtgatatgacacaggcgttaattcttcaaaaacatcaggttgaaatgtactcccgagatggtggaccaaccgaagaagattacaaacgaaatgaaaaggacttggcggaatttgcagctagtttctggggtcaattcaaaactgaacaagtcattaatggtacgccggtttcttcattagatgctatcaatcaagctatcggggatgcgctgggtgttaaaaaagacgatgacgatgatcaggacgatacgggaaaaaactaaccgtagaggatgttaacgaggcgattaacaatctcaatgatttctacaaggcaagactcaatgaaggttaccactttcaagaagtcgaccgattattcgtctcagatattgcacgttggattcgtatctacgaagaaaaagaaacaacgattgataaagcatttccgttcttattttagaggaaaggaggataaaaaatggcacaaagtttaggccacttggcttcaacagtctcattgaatattgacccttttaaatcatcatctaatgctttaaaggcacaaattagagctaattcatcagctttaaaggcgcaagatgctgcatttaaatcgtcagggaacaacatcaataatatgaagtctgtctattcatcaatggaacaacagatgaaaaattataatgctcaattagcgcgtcaaaaagaagcatacgacaagctaaaagggaagactgctgagactgaagcagaacaagaaaaattaacagctcgacaagcaaatgcagctaatcagtacaataaaacttcagcgaacattgaagttctaaatggcaaaatggttgcgatgcaaaagcaaattctaacccaaaatgacggttggattaaagcgagtgagaaattatccgcttttagcgataagacagcgcaagtgagtcaaaaactcagttcggttgggcgagatatgacaaccaaagtgacgttgccgattgtcgccggacttggttatgcagctaagtctgctgttgatttcaactcacaaatcagtgcaattggtccattactaactaacggtggcaagattactgcgtctgttcgtaaagaacttgatcagatgggtaactcgtcaaaaacatgggctatgcagtttggtatatctactggaaaaattaatgatggtatgtctgagatggttaagcgtggatattcagctaaacagactatgggtgcaatgcctgctgtcttaaatgcttctaaagcttcaggcgaagatttcaatgatgtaatgagcgtgtcaacttctactcttgaacaattcgggctaaaaactgagtcaacaagtgggatgctgaaaaatactactcgtgttactgattctttaacttatgttgccaatgcaactgccgctggatttgatactatgggcgaagctatgacctatgttggcccgtcagctcatgcagctggtattagtctagaagaaacagcagccgcaattggtgtcatgagccaaaagggtatcgaagggtccgttgctgggacagcattacgtggtgcgttgactaaattgcttaatccgtcaaataagaataggcaagggtttaaagaacttggcgtttctgtagatgattttaaaaagggcacgttaacgttacctgaaattcttgacaagattaaaaataataccgaaggttggacagaccaacagcgtgcgtcttcgattgcattagcgttcggtaccgaagcacaggcagggatgaacgcacttatttcatctggtggtgacgagttacgtaaatatactaaaggtgcgcaggaagcttcagggactacaaaacaaattgctgatcaattaaacaacacgcaggccgcaaaagtagcccgtttcaaagaatcaattcatgtattgtcgattgaggttggtgaaaaactacttccagcgctattaccgttagttgaaaaagcaacggatatggtacaaagttttgccaaaatggatgatgcaactcagcagtcaattattaaatgggccatcttcgcagcaacaattggaccagttgccggaactatgggcaaagttggtacggttgtttctcaaggatcatcactattcagcatttttgctaaaaaggttggtgaagcgaatgttgcgtcgcaattggcggctggtggtttaggtaaactaggaccagctgcgttagaaggtgccgctggtactgaagcactcgctggtggtgcgactgcagcaaccgccgcactatcaccggtagggttagcggttttaggcacagttgccgttgttggagcaggcgttgccatctgggaattatggggtaagaaagcctacaattcaggacaacgcgcacaacgctggggcaccgatgtaggtgaagcagccgacaagtcattaactaagatgcaagggttttcgactgaagtttcagcatcattggaaggcttcaatggtaagaccgaaacgaccaccaaagaagttgcgtcaaacttcaatgacatgtttagccagatgaagaaggattccaaagattcattgaaacagatgaaaaaggacatcgacgacttacctggtttcgccaaggcatccgctgaaaaagaattaaaagcacgcaccaccaacaatcgcaaaattcttgatgatgcgaaatcacaaaataacctggttcaacaggtgttgaagaaacacaatggcgatgtgtccaagctatccgatgatgagcgcacgattgttttaaatgcgcgcacccggatcaatgccgatgaagtcaagctgcttaagattagtggcagtgctaagaagtcagttattgccgcattgaacggcgacattaattcaatgtcgaagaaacaacgcggtgaagcgattgacgatttaaccaagcaattccgttctgaagaaaaggtttatcagaaacagcaaggtacaatcgaaaaggcctacaagaatggctcgatttctgccaaagcttataaagatgacctgaagcaactggctgacatgcatgaggtgcaaaccgatagtatggccgcttcagttttcaggttggccaaagccaatggtgaatctaaggaacagatttcaaacgacctgctaagtatgggttatacctatgagcaagccgccaagattgttaaggatcaatcggcaaacatgtccaagagcaccggattggttgccaaagacacggcaaaaatgtcgaaagcgaccgaaaaagcaaacgcacagtggaacagcctaattttcgaccctaagaccggcgagttgaaaaccaacgcccaagaggaagtcaacaaggcggcacaatctgaagagggttggactaatctgaagtacgacctcaaacacgccaatttaagtagcaatgccaagttaatgattggggaagccgcgcttgcgaatggtaagtgggaggagctcacttggaaggaacaacaagccatcgttgccgttaaaggtaacaaggaaatggccgacatcattcaacagttcggcatctgggatcaattcacccccgaacaaaaggaagccatcttacacggcgatgcgtcaccaattgctaacctgcttctaaagggtgggcaatggaacgatctgtcgctcaaggagcaacaagcgcttgttaaggataaagcgaccgtcccattggttaatatcctagacaagtacggtgtatggcaaggcctttctgatgaagaaaagaatgctgtgcttaatactaaaggcgctcctgcactggcagatatggttatcaaatacggtacttggaatgatttacctcagaaacaaaaagatctattaatcaacaatactgatgcccgccagaaattaatcgatgccggtatcttattagacgcatacaagactaacaacccggcaagcaaaccactgcaagcacatgatggtggtttagccggggcagtcactgccggcaatgcgcaagttgatggatttaaaacaaataatccaccaagcaaaccattgaaggctcacgatgcaggtttaggcgtcgctgtcacggacgccgatggtaagttgattggcttcaggcagaacaaccctgagagtaaaggtttaaaagcccatgatgcgggattaggtggcacagttaccgcgggcaacagcaggattgatgagttcaaacgcaacgatcctgggcttaaatatttacgtgctaaggatgaagcatcatcaaatgctgcagcagctaaacgtgctgtgagttcatttggtggcaacgagacaattaccaagaccctgaacgttgtcgctaatattggcaaaggtgtcaaggactttttgcatcttgaaaatgggacgacgaatgcaccaggcggtcctgcaatcgtcaatgatcagcgcggaccaaactaccaagaattaatcattccaaagggcgggacaccattcatgtttgcggaccgcaacgcatttgtcccacacctgaagaagggctccaccgttatccctgccaacaagacacgccgtattttggagcacgtccccaaattcgccaatggcaccatcggccacaatcagacggtcaacacgctgttacgcgctaagccaatgattgaagcccagaaacaacaaagcatcattaatcagacggtgcaggtttcaaactttgataatctggaatcacaactcaataagctcgacaagttggacacggtagtgaatgtccttggcgaaattctggccaagaatcctaatatcattctggataaaaaagtcgtcagcacattggttgaaccaggtgtctcaaagaaccaaatgcaaaataatgtcctagcagaaaggagagtccatagtggctagatggaagcagatttattgggatggcgccggcagttttgatgattatgggctcacaatcaacgaaaaggagattggcaaccctgcaaagaaaaagcgccgcgtcgctatcccaaatggcaacggttattacgattatgcgtcaatcctcggtgaacagtacggcgagcgccaattgaagtacaccttcaacattggcgattatgcgacgctacgcaaggacatcatgaataccaagaagattaaagcattgaattggcttgtgccgggtacacaacgcaagctgtttgatgaagccattccgggctattatttcttggccgaagttcaggacgcaccgacgttcaccgagtggaaaggcaccggcacgttggaagtcgtcttcactgcttatccgttcaagattagcgacaaattcgagggcgacgatgtgtgggacacgttcaattttgagttggacattgcccaaaacactgagttcaacgttaacggaccactgaccagaaccatcttcaatcagtctgtgacgcgaattgcaccagagattgtggtcactggcaaggtgcaagtgacgctaaacggcaagacggtctcatttgatgccggcacttacaccaggtcgccaattaattttggacttggtgaaaatacggttcagttatccggcaccggcacgatctacttcaagtttaggaaggagctgttatagatgtacgaagtgacactctataaggatgctgctgacaaagttggggtggtggttaaggccagttacatgaaccagatgaccgacgacaatcaacttggaattggcatcaatgcttcagacaagttcacgttcaaaatttatccgttcgatccagtctataaccagattgaagggatgatttctaaatatcagattgtttcagaatcagacggccgcattatttcgcgtggccgtcttttatttgttgaagatatgtacgacgagggtgccggcttttataaagcggtgacctgcgccagtgatttggactacttgaacgactctaaacagccatttcaaaaagtccaaaatacaacgcccgcccaagactttaccaacttcatcaacattcataatcagcaagtatcatctgatcggcaattcaaggttggcaagattgagattagcaattcaaccgacaacgtttaccactatgttgccccaggcacggcgacgctcacgacgattatggacaagttggtcgatcggtggggcggcgagttacgtgtgcgctatgaatcagatgggcgctacatcgactggttgaaggaaattggcaagcattccaagcaggaaattaacgtcaacaccaacctgcagacgatggagcgcaagcttgacccgtcaaaagtctattcggtgttttatccatatggggcgacacttgagcaaactaattccgagactgaaaccggcacagacgttgccagtccacgcctgacaattggtgccgtcaatgctgataaagattatttagagcgtgcggatttgattgctaagtttggccggataagtggcacaaaggattgggatgacgttcacgatgcaggtattttgaaaacgaaggcgactgccgactttgacagctacaagccggttgccgtggggtaccaactcacagcgattgacctgcagccattagggttggaggttgacgggttcggcatcggcgattacaactggctcaataatgagtatatgggaatcgatgacgagctccggattgtcacattgactctcaaacttgacgaaccagaatcaagtgagctcacaattggcgataaggagttaacccttgccgaatacaatgggattcagaaaaagaaaacggcgcagattggtgtgatgaagtcggagctttatttccaatccacaaaagtcaccgccctaaacaaagagctcaccgccaccaccgaatccctaaccacgctccagaccgcctacgacaagctaatcgctgacatcggcaacgtcgacctagccacaatcagcaagcaattaaccgcgctagagcaccagactgaaacaatcatcgccaacctagctgagattgcagatagattgctaacgctggatgcatttgaaaaagaccaggcgaaattgaacgcgacgcaaaagacaactaacgaaggctttgaagagcgcatcagcgcactagaaaaaggaggtaaatagatggtaaatgaagtagattatagggattcaacacccaacaaattcccgcaagactacgacccagccaaggttgacccacgggttaagctgcggtcggagtcgattaggcataagcaaaaaggtgtagacgttcgtggcgcgattcatcaagggcttgagattagctctgtaacagcaactgaagctaagacgacggcactggacacggcaagccgacaagatgccgttgaccaatcacaaaaggatttcgaagatcgatataatgagcagattgctggcaatactgatttgaacgaagttattgattcgagaaaacctaaagacttaccagcttatgccacgcttggcgagagactcgacgatttataccacgggcagaaattacaactcggcttagatctatcggtgattgaaaagattgcaactaaggcaaaaacaatcaatcacgatgcaagtgtcttaaagattggtcacatcactgatttgcactttcaaaaactgcttgatactcaatggtatggtaacgcggtgttggacgttgaccacgttaaaatgttcggcttgtttgcggacaagctaaacgtattagtgcttaatggtgatcaagtgcacggccaagaaattggcgagaatggaccaaatttgacgcagttcgaaggcagtcgaaaagtgttaatgagccgcaacgatgaagtgatgagcacagccgattattattcaggcgacgctgacgtattcgcaaatattggtaaccatgacgatggctcagttagatgggataacccgctgacattaaatgagttaaagcaagcttatggggtagattcattcgacacatataaggattatgcagagcaaaaggttagattaatcgtgctgaacgtctttaacaatattggcggggacttaaagcgcgctactaatagcgttatcagtcaatcacaattagattggctagttaacgacgcacttaaagtgcctgaaggatttgtaacaattgtattcacacatgcgccattagagggctttttcgataataagccatattctgatacgtggaagaatattaatcatgatttagttaaaggcgtccttacagcctttacgaacggcgttagattttcggacgaaaccgacaatggcaaagttgatgccgattttacgtcacaaggtaagcgagacataatcggggttgtgagcggtcatgaacatagggatgcgactgcaccagaaatacacaatggcatccgtggaattgagcgcacttgttcggttggcgtaggcgatggtcgtgttttaggcgaatttagcgaattggcgtctgatgtgattgagattgacacaaccaagcgccatgtcaaatttaaccgaattggctttggcactgatttggaatttgactattaggaggtgaaaaaatggctacacaactggaaaaagacgttagatttattaagaaaacacttgagacacacattggtgatggaggcagtggtgtccacgcactagccaataataaagcgccaggctttatgggggcaaaagagtttagtaacatccaatctatttttgaaggtcgaatgtcggcatacggacaagacgtgctagccttgaagtcaggtttctattacggttcgggatttttgaatgcgcctatagaggttgactcaggtgcactatgtgaagtagatgttagtcgcagtattgatggatataaacaaataacctttaggcataattttgaaaataaaatgtggacaagaacccagcacaaaggcgtttgggggctttggtcaaattgtcggcaagaaatattattgtgggaaggctcagcagctgaacctaacacgcctatgcgatttgcagaaccgtatgctgattttgaccgacttaagtttgtagtagttggaaactccaatactgctgaaacatatgaagtcaaaattgaaggggacaacattgcagtaccgtggactaatatgccagacccagttgccgggcaaacctatgtgccacaattccaaaacggtgaaatcatcgtgagattgagcgccgatgggattcaattttacatccagtggaacactagtatttcagtcttttctggtggtatcagcaaactgccagacgtaggccacattaagcagatttggggtgttagatgatgcggattgttttagatgaacaaaaagcaattgtcagttatgtattaattggggatgtcgagggctctgttgaatacaatggcgaactgcccgatgattttataacgagctttaaaccgatgttgtttaaattgcagggcgatgagattgttaggaatccagactattgtgagccggaaacgccaatgcgagatttaactgaacaagataagattaacgcttatcaatttaagatgaatttagattttaaaaagcaattagaggagatgagacatgatgaataaggagtacatcacgttcttgtacagccacggagaactagatcttgattatttaaaactagccgttgagttcggacaactcactcaatccgagtatgacgaaatcgtaaaggagacctaacatgggcttattcatcggcatccgcaacggcatcatcatggccacaccattctgggtgctggtcatttttgttttaatcaaattgttataggaggcttagcatgtgaaattatttggcatgacatttggagagttgtttgcagctttctcactgttcgtcgcgttcatcagcatactcgccaagattattcagcgaatttggtttgatgacctgactaacgcgattcacgaattaacagcagagctaaaagagagtaaggaagaccgtcgacaattgcataaagaagttggcgaattagacgacaagattattaggattgacggcaaacaagattcattgtcgcaacgttacgatgatcacttggaattttttcacggaatcgaaaaaggaggacacaagcatgaaaattgattggcaagctcgcattcggaacccacaattctggttccagattgcaatttcaattgcgacaccagttggcgcgtactttggactcaaagcgcaagacgtgaccagctggccgattatggtcgacgtattaggcaaggcggtctctaatccgtacgtgctaatgctagtagcgtccaacgtctacacaacaattgttaattcaaatactaaaggagtgaaggattgatatgaaaaaaataatgagattagtagtcgccatcatggcggctattttatttgtccaggcatctactgggttggcgcaagccgcaaaaggtgaccaaggtgtcgactgggctaagtatcaaggatattacggcaaattcggctacggatcagataagtttgtactcgcccagattggtgggcacaacagtggcgggctgtatgaccaagacacctacccaacgcaggtgcaatccgcaatcgcccaaggtaaacgggttcacagttatttctggtgggaaaacgtctttaaccaggcaactgtcgatcagctcatgaattacaccatgccaaaagtgcagacgccaaaaggttcaattgtcgccatcgactttgaagcgggcgcaggaaacgcagcactcaatacccagctgattaagggcgctatgcaacgcatcaaaaatgcgggctatacgccaatgctctacggctacaagtcattcttgcaaagcaacgtctacctcgaccagatcatcgggcaatttggcacatgtttatgggtcggcgaatatccagattacaacgtcacacccaagcccaactacaacttttttccatcaatggacggcgtggcgattttccaattcacatcaacttatattcttggtggactcgacggtaatgtcgatttaacaggcatcaccgacaacggctacaccaagcacgacaacccagtcaccgagacaccagcaaccgacgcaggacaagcagccgataacacccacaagagtcaaattgaagtcggcaacacggttaaggtcaacttctcagcacaacgctgggcaacgggcgaaggtattccaagcttcatcaaggggcaatcttacaaggttatccaagtcgccggcgatcgcgtgctattagacggcgtactcagctgggcaaataaaaaggacgttgaaatcatcagcacaacgactggtaattcaacatccggttcaagctacacagtccaatggggtgacagctggtgggcaatcgccaaccgctatggcatgagcatgtacaacttggccgccatcaacggcaagtcaatcaatacaatgctctatcccggtcaagtccttcaagtatctggcacgacaacgaccaaccgcacatacgcagtgcgttacggcgacaacctaagcaccatcgccaaccgcctaggcacaacatggcaacaactagccaaccgcaacggcatcggttcaccatactggatttacccaggccaagcattggtatattaaaaaaagccctcgaatgagggctatacatagttctatttttggacaaaatgatgtggctgcatttcgccttttgcatttctatttttagggcagaagccgccatcgcgtggaactttgccacccgaaccagatttaccgcactgagtacatttccaatcaatcataatagaaacccctttcatttgtatgacaaattgatattacaccagggaagatgttaaagcaaatagcaaaataagcctagctcactttgattagtgggttaggcttttttttattctagaaatcgtgaagttcgatttcaatttctgtaattcttttattgaaatatattgagctagctataattcccccgattaatatacccaatgaaattcccagaatcatcatagcagatcctttatcagaaacaaaatttgttatagagcccacggatttatgggtggaattatcaactatataagagttgtaaccatttaaaacaaaaatactttctttggggatagtcgagtttgcttgatcgctcttactatttaaaaatttctgccataaattattagcaaatggagtgcttaaaataaatgttagaacagtcagtaccaaattaataagtttttcccataaaagtaaagtattgcgtttcgtaatcaatgctgcgtaatccttgttgtttttgtctgtcatgttaatcacctcacattgattataataaaagtctgcgtaatattccacttgacttatgcgaatgtatgttcgtataataaaactcataaaggagtggtcaagatggattatattagtttaaaaggtacaataaacagcgctgttaaagtaatcagtttcacaccgtacctcgttcgctttgaacttaaaacagccgaacaaagttacaattgcctggtcgcaaaagatgcgcttaattttatgtaccttgctgaagaagctgcgccaatctcaatctttggccacttcaacaagcgcaagcaattggttgtcgacaagtaccacgtccaaagcggggtactagcgcgatgactaaaagcgagtatgatcctaatttagtcaatcagtttttaaaacacgattatcatgaccgcggaatgatgaagtggcaaggatttttcttaagcgaccacacatcgaacatcagcaagacggctaaacaggaaaaagaaatgtacgaccaacagcacggcccgttaatggagacggaagaagtcgtcgaaaccatcaatcaagcaatcgtaaagaatagacgggtgcaagtcgaccttgccgagcagacaattgacggcatcatccccaagccaatcagtgggttaattcagggctggtttggtcagcaattatttgtaaatgataaagcaatcaatattgaagaaatcagatcgattaagctgatataatgtaatagaagaaacctgtgggggatgtttacgtgtcaaaatttgaatcggtatcaattaatgatgagtacgcactaacattgaaggaaaacggcaatgtcgagttgcatcgtgcaaatgtcggtattgttggaacaatgagctactattatactcgaaacgatttacccttattcatttgtcgccatgaacccagcgcgaatttaagaacaattcatgacgtaatggtcaagttagacgatcagatgcaaaagatggttgaatgtggctgcctaatggtcggcggaatgaatgtagctaatcagcaatagatgaaaaagacatccttaaagacttaaggatgcctttttatttgggctaaatgggcccacaaaattactttgacccgattttgactttagtagtaactatgcccggtataaagcaatttctgaataccgtacggctaataataaaaaaagtaatgcggttttgttaatttcaaaatagcgataaataggcattttgaccttagtgggtcaaaatcctgatattttctccatttgggtcaaaaaaaggtcaaaatatatctgtcttctgggacgttttaaacaaacaaaaaagccgctaaacattagtttaacagcttttctggattctaggatgttttaaatatcacccgtacggggatcgaacccgtaactccgccttgagagggcgacgtcttaaccgatttgaccaacgggcaatgttcggaacaactaatatcttagcgaataaagcctgtaatgtcaatggttaattgactctagcgaggctaaatgaagattttatagttacgacgattaatgttaataatttccttggtcatagtgcgatttgtttgtctctttaaatgtttcaagatattccgaatatagtcctgatggtttatcagtagatttagaatatcgttatcaattgtgacttcaagcgtcctgcgtgaatctatccaatcaatcacaacgtggtcttgatcatatacggcaactttcccgtcaaataatttttcgatttctgcttttttcatcattggaaccacctccaagaatagtatagtcctcttttaaagatttgttaaaaatcataattgacaacgtctggagtgtgcagtatcatagtattcgttgatgatattgggtattcgccaaattggtaaggcaccggactctgaatccggaatttataggttcgagccctatatacccaattaagatagaaagagctgagtaatcagctctttttttgtggctttatatcgatagggcagattatttgtatctctctgtctcaaacatgatttggatcgcatagcgatccgcaatcttagctaaagcccgtaaattgaagaaccaatagtgtgctaatagcttacttttgaaaattaatgttgtgtcctgagcaccggaaatttgaatcattcgatcatccaatgcgacgtttaaatctaaatcatttaattttaaaactttcattttgatcacctcgtcttattattacgttaaatagggcggttatttttgaaagagggttaattaattcaaaatagcatatttagcatttttatggactgtaatccttggtgttataaccttttaggccgattacaagtcaattaaattgtgggcttcattacaaagttaggtgaaattgccgtcattttgttacggatttgtcatcaattgttatggttttgatatttactaacggatttaagatggtatattagtcccacgttaaacagatagaaaaatcaatttaaacaataaggagtccattcaaaatatgaaatctttaaaaactttactttacagtgccgctttaacaacagtcgcaacaaccgggttacttttcgttaaccaatcacaagccagtgccgcaacaacttataccgttgcaaatggtgatacgctttcaaccattgcgcaaaaattcaatggtagtaccgagcttgttaaccaaatcgcaacaactaataatatcgctgatattaatatgatctttgttggtgaacaattaacaattgatgctgaccaagtggcaacaacaccagcacaaacaacagcccctgttgtaactcaacaagtagctacacctgttcaaacaccggcccctgtagttcaagcacaacctgcagttcaagctgcaccagtacaacaagcacccgtagctgcacaaacaacaactacaacgagttcatctaaggaatggattgcacaaaaagaatcaggcggttcatattcagcacgtaacggtcaattaatcggccgttatcaattatcagcttcatacttaaatggtgattattcagcagctaaccaagaccgcgttgcagatcaatatgtaacaagtcgttatggttcatgggatgccgctaagagcttctggttaagtaatggttggtactaaactaaaataatgacaacgtctaggccattggtctgggcgtttttttatggtaagttagtgattggaagtgtaaactgaaagtagtataaagagtgaggcttgatcagatgaagattttaggagtgttaggcagtcatcaacgagatggggtcaatgggcaacttttagatgccgttttagcaggtgtaaaaccggaagatgacgttgaagtgatctttttaaatgattatcaaatattaccagatgctggcaaagccaatccggtattagatgaactggaagctaagttattggcagccgatgtttggatactggctgcgccaacttattggggcgcaatgtctggtgtgatgaagaactttttggattgtatgcggcaacgcttagtgcgcttcaatcgggcgggcgatgcgttaccggatcggttcaaaggcaagagctacatcacaatcagtagttgttatgccagtccagctgaggaattggttactggtgtgactgacgggacttttagaacttttgataaagtcttgggggcagctggacttttaaaaatccgggaaattgtccagacaaaaacgtatggtttaaagacactttcagcgcagaaacaagcggaatgtcgccaagtcggcgcaagcattcaatctaaagcaaagaggacggatgatacagtgaaacgatatatacaactattttgcatggtcgcttgtgcaaccttgattacgatgttactgcaacaattagtgaacttagtgttgccaattggccagttttggcttaattatgtgtcattcgttttaatcttcttcattctattggcaagtgtgttacacttttttacggtggttaaacaccgcagacattaggagggattcagatgaaaattgcattaattgcacatgatcgtcagaaaccaacgattgtgaaactggcgacggcttataaacctattttggcgcaacacgaattatttgcgactggaacgactggtcaaaaaattattgaagcaactggcttgccgattacacggtttaagtcaggtcctctagggggcgatcagcaaattggcgcgttgatttcagaaaataagatggacctggtaatctttttgagagatccattgactgctcaacctcacgaaccggatgtgaatgcattaattcgattatctgacgtttatgaagtaccgttggcaaccaacgtcgggacggctgaagtattgctgcgcggtttggacttaggactggtcgactttagaaaagtggtccatggtcaagatgtcaattcaattaatttatagtgtaaagcggattgtaccttatttcgactgtgaaatagtgcaatccgttttttgatttcaattttaatttgcgtataataagagtattgatttggagggattgggttgcaaaaagaaatagggtttcatgatcggctaagcacggcgatgtttttaacgtttcttggtggcttcttagatgcgtattgtgtgattttacgtggtggcgtctttgcgagtgcacagaccggtaatatcgtgttcatcggcttagatatcgcaacgaaccagtgggcacaacttcctgaaaagatattacccattatttcatttgggtttggggttattattgtgcagctggcgaagcggcattttaacactggtgggttgaatgtttggcggttgtggttattaggttttcaaattattgctttagtagtagttggttttttatcaaccgcgattcccaacatgtttgtgacaccgattctgtcgatgtcgatggccatgcaattagcgagttattcaacggttaatggctatccatatgcgaatgcttttacgaccggcaattataagaaattaatcgaaaatacttatctatatttagcgaccaaagaaaaaaactaccaacaaaaagcccggtacttcgggttaattgttggtagcttcttcattggtactattagctcagggttaattgttaagttaatcaatgtgcgcactgcatggatagctgcgattatgttgacggtgttctttggttttcaattgtattttacagaagaagtgattgctgagaccaaacatatgcaacgttagccgtaataataaacaattaacatggcaatgaaatatgcgccgcaaacagcagtgctaatccaactggcaatcagaatgatgggatgcgcaataaaggcacgcatgacaaagagaaacaaggttaaaatagcatacttaatacagctgacctttagctgttcaaaatgaggcttattcaaaagaaagatccactaaataaagttgacggtcactaagatgggcggtagtaatccacacatcttggaagccgtctttttgtttttcttcggtttgttgataaaaagtcgtcaataagtcatggtgttctttgacgtactcggggtcaatccggttaacgtgtagccgcatatcagggaacagtttctcggcatctggcagatcgacttggtcactaatgccaaagcgaatcacgttcgcatattgaaacggttctagaaccacttcatcaggatgttcttggatgtaagttaagatggttgttaatgcagacatagtcatgcttcctttctagtcgtttaaaaaatcgtaaagccagcagtaatgttattcaacatgtgtaaggcaatattactcttaatattatgggtgcgatagtagacgatagccagaattaggccaagcagtgcttttgaaatgaaataaatcggatcagttgcgccgtgcatcaatccgaataagatagcacttaacccgattgagatgattggtgtgcctgggaaaaaccaattcattaggaaccctctgaaaagtaattcctccataatcggacctaagaatagggcgtatggtagcatgaaaataccaatcgtctgaaagactgaggttagtgcatcaacattggcattaccggtagtatgcataaacgggattgtaccgttattgacagcaaccatcgcgataaagccaatcaacattgtccaccaagtctgtttggtgaagggttggtcataacgcgttgatttaattttttggtagtaataccacattagggcagtaatgccgatagtcgtgattagaaaaagccaaccaaagactaaaattagatgggttgtctgttgggccttagggagcaatgataagccactgacaatcattaaaggaacttgttggatgataatcagaagcaaaaagacaatcccatgtttgacgtgtttgataagcaccacctccgtgtgcttatcatagcatattcccgtgaatgaataaaagattgaatgcggattgctgttcaaggcacgatgctttatgttagattaaaacagttaagaaaggggtgtttggatgtatttagcaattaaagaaattaaacatgctaaattacgttattcgttgatcatttttacgatttttctaattgcatatttaatctattttttaacggggttggcatatgggctagccaataataaccgttcggcaattgatcaatggcacgccaaagaagttgttattagtcagtatgcgaataaaaacttggctgcttctgaattagatgttgatcaattaccctctattaaaggtgcacagaaaaatcatgcgcaacttgctcagatgatgggtgttgtgagtagttcaggtttaagtaagcaaaatacgagtgtttttggtatcgattttgatgcttttttgaagcctaagttgcaaaaaggacggtatcctaaaaaggcaaatgagattgtggtcgacgacggcttacaaggaattgctttaaatcaacaaattaaattgaatgggcgtcaacaaaagtacaaaattgttgggattacgacgaaccaccgctataatacgcaaccggtgacttatttgcggttgaccgattttagccgaatgcgctacggcactgatcagattacgcgcattaatgctttagtattaaagggaaacgcgcggattaagacaacggatcagctgaccaaactgacaattccagaattaatcgataagattccggggtatgggccacaggttaagacgtttggtttgatgattggcgcattgctagtcatcgtcgcctttatcgttgggattttcatgtatattattactattgaaaaaacggccgtatacggggttatgcgagcacaagggatttcaggtggccaattagttggtagtttaatgtggcaatctgtattcttaggggtgattgggattggccttggtttgttgtgtaacgcattgacaacattggtattaccagcggcggtgccgtatacaaataatcctttactaattggggccttttctgctgttttacttgtgatgacagtcattggcgctttattctcaatttggcggattctaaagattgatccgcttgatgcgattggaggggcataggatggctttaatgcgtttagaaaaaatcgtcaaaaaatttggcgcaggcgaccagcaaaccacggctttagatcaaatcgatttaacgattgaaaagggccagttcattggtttaaccggaccatctggttctgggaagacgaccttattaacgattatgggtagtttacaaggcccaacgagtgggaagctcttttttaaagatcaagagattagtcaattaagcgaaaaacagcggtctgcattacggtttaacgatttcggctttatattacaaagttcgaatctggttccatttttaacggttgaagaacaattcgaactagtcgatcgattacgtgaaaagcaagcgccacaatcagctgaacaactattaaccaatttaggtgtttgggatcaacgacgtcagtacccaacgagcttatctggtggtcagcgtcaacgagttgcgattgctcgggcattgtatggtcagccagatttgatttttgcggatgaaccaaccgctagtttagatagtaaacgggccttacaggttgctgagcagctggctaaaatcacgaaagagacaggacagacgattgtgatggtttcccatgatgaacgcgtcttggattatacagatcatcaatacgtgatgcgcgatggtaaactgacataatgcgactcataatcataaattttgactaatgttggttagctatcctatcatataggtagaccaataagaaggagtgattttgaatgacagataaagaaaagttagatggcatgaaagaccaagtaaccggtaaagtacaagaaacagccggtaaggtgactggtgatcgcgaaactgaggccaaaggtaaagcaaagggctttatgggtgaagctaaagaaaaattagcggatgccaaagacaaagttgctgaaaaagccaacgacgtgatggatgatattaaagaaaaaatggacaaagacgataaatagcgccttttaaagggaaccggcagacgatagtctgccggttctttttttgtggatttaatgcttgcatgagtgcctaagttggcgtattatgacattacgtcacaattatgacgctctgtcattaattttcagaaaggagtatcgaaatgccgaagaaaacattttttagattacctgaggaaaagcaacaacgactgattcaagctgcgcatgctgagttttcacgggtaccgtttaatgaagcatctgtcagcaacattattaaaacggcggagattccgcgaggcagtttttatcagtactttgaagataaggcggatatttttttctacgaccttagcttattacgcgacagttcaaagcaggatttagaaaagagtctgttggctgttcatggtgatctattcaaggcaattcgccaattctttgctgaaatggcagaagagattattaatggtgaaaatgcacaattttacaagcacctcttcttacatatggattataagaaccagcgcaagatgtcaccagaattaatgcatgccaaacaagtagatgggatgcgctttttagaagaaaacgtcaattacgacttgctcaagattaacgcagatcaacccgaagcgcttagaattttatttcatgagttgatgacgacggtctttcaaagtattgcagcgtattatctgcaacaagaaagtgaccatgcgattacaattgaacaggtccaagaacgcttcgaattagtattaggctggttagaaacaggggccagcaaacaaggataaggaaagaagggacacacaacatgcttaaacttgcaaagaaaagaatgtcaggttgggccgtctttggtgcggttttattcatgacgattcaggttgtcagtaacctttatttacccaatttaacctccgacattgtcaatgacgggattgctaaggggaatattgattatatctggcaagcaggctttaaaatgttaggtttttcattaattagtattattgcagccgtctgcaacgtttatcttgcggcacggacgtcacaaggcttaggccaaaaattacgttcagatatctaccggaaggtcatcaacttctcacacgatgaaatggatcaagttgggacgtcttcactaattacgcggacgactaacgatgtggtgcagattcaaaatgtggcaatgatgttcttacggatgatgattatggcacctatcatgttgattggcgcaagtttcttagcgtatcaaaaagatgcgcaacttacatccattttcttggttgtcttaccaatcatggcactcttcattggtggggtgatgtacttcgctgtgccattattcaaggcaatgcagaaaaagacagaccggattaacttagttttccgggaaggtttaaccggggttcgggtcattcgagcattccggcgcgacaagttcgaacaagaacgttttgatgaagctaatactgactacacgcaaaatgcgaagaaagtttatagtattatgtcagtgatgttcccagccatgacgttaatcatgagtgggactaacattgcgattacttggatgggtggacacttaatcgccaatcaagcaatgcaagtcgggaatttattagcgttcatgacttatgcgatgcaaatcctcatgagtttcatgatgctttcaatggtcttcgtctttatcccgcgggcgcaagcttcagcagtgcggattaatgaagtgcttgatttacacacgccgattgaagatccagcgacgcctaaaacgtttggtgatcaaccagcaagcttggctttcaaccaggtcaacttccgttatcaaaatgcggaacacttagcgcttgaaaacgttgatttccaaatgacagcgcgccaaacagtcgccgtgattgggggcactggctcagggaagaccacgttagtcaacttgattcctcgtttttacgatgttgaaacgggtgaagtgacagtcaaagggttaaacgtgaaagatgtgaccctccatgacattcaccaacaagttgcatttgtccctcaaaaagcgaacttatttaccgggacgattcgggaaaatatgcaatatgggaatccgaatgcgaccgatgatgaaatctggcacgcacttgaaattgcacaatctaaagatttcgtcagcgaacttgaaggtggcttagatagtcacgttgaacaaggtgggggcaacttctctggtggtcaacgtcaacggcttgccatcgcacgggcgttggttaaaaaagcggctgtttatgtctttgatgattctttctcagcgttggactttaagacggatgccttattacggaaagccttaaaagaagatgctgaaattcaaaagagtgtcgttgtgattgttggtcaacgggtatcaaccgttgccgatgccgacaccatcttggtcttggatgaaggccagctggtcggtaaaggctcacatgctgaattgaaggctaataacgccacatatcaagaaattattaactcacaaatcagagagggggatgaagactaatggctgaaaaaacaacaaccaatcgaccccaaggtggacatggcccaggccgtggcatgggtggtgtcgttgaaaaaccgaagaatttttggggcacaaccaaacgattattaacctacatgtctagccggttaatcggattagtgattgtgttagccttagcaatcatctccgttattttccaaattagaacaccaaaagtattaggacaagcaacgaccgaaatcttcaagggtgttatgaagggcaatgccatgcaaaaagcgggcatgccgatgaatggcttaccaattgatttcgataagattcaacacattattatgacggtgattttgatgtacttagcatcagcggttttcagtttcttacaacaattcatcatgacgcggatttcccaacaaaccgtctatgaattacggaaagaattaaaagacaagatgcaacgggtaccgattaattactacgacacacactcaaacggcgatatcatgagtcgtgcgattaatgatatggacaacattgcaagtaccttgcaacaaagtttaacgcaaatggtaaccagtgctgtgacatttattggcgttatgtggatgatgctctcgattagttggcaattgactttaattgccttagtcacgattccactcagtttagtcgtcgtcgggattgtcgcaccgaaatcacagaaattcttcgcagcgcaacaaaaaagtttggggttgttgaacaaccaaattgaagaaaatttctctggtcaagtggtcttaaagaccttcaaccgcgaacaagtcacaattgatgcctttgaagaacaaaatgcattactctataaagcagcttggaaggcacaatttatttctggggtcatcatgccgttaatgacgttcgtcaataacattggttacgtcttcgtagcaattgtcggggggattcgtgtttctcacggccaagttactttaggggatatgcaagcgttcatgcaatatacgcaacaattctcacaaccaatcacgcaattggccaacttagcgaatacaatccaatcaacgattgcctcagctgaacgggtctttgaagtcttagatgaagatgacatgagtgacgacccatcagaagtgccagcgattgttgatgaccaaaatctacttgaattagaacatgtcgaattcggttatcaaggtaaagatatcttgatgaaggattacaacttgcaagtcaaaccaggtcaaatgattgcgattgtcggcccaacaggtgctggtaaaacaaccatcattaacttgttggaacgcttctacgacgtgagtggcggttcaatcaagcttaaaggtgtcgatacgcgcgatatgactcgggaacaattacggcgtcacttcgcgatggttttacaagatacttggttatttactggaacgatttgggataatttgaaatatgggaacgctgatgcttcagatgaagccattttagcagccgccaaagcagcgcacgttgacggttttgtccgtcaattacctgatggctatgagacggtcttgaatgaagaagcttcgaatatctcccaaggtcaacgccaattattgacgattgcgcgggcctttgttgccgatccagagattttgatcttggatgaagcaaccagttcagtggatacacggactgaaattcatattcaacacgccatggaacgcttgttgcaaaatcggaccagtttcgtggttgcccatcgtttatcgacgattcgcgatgccgataacatcatcgtgatgaatcacggttcgattattgaaaccgggacccatgatagtttgatggcacaagatggtttctacgctgacttgtacaatagtcaattctcaggcaacgttaaaatttaatcatgaatgacgcaaataaggccgcagataaaatctgcggccttatttttgtccgtgtttggcgtatactagtgatattgatgtagtaggaggaatttaacatgcgatttgaacaaaccatccggcaaattggagcgctagttgatgaagggattgtccctggtgtttcttatgccatcatcgaaggccctgaagtgatgactaatgtaatcgggcaggccgaattagtgccccaaaaagtgccgttaaaagctgatcagttgtatgatttagcgtcattaacgaaagtgattggcacgacgacgattgttttgcggctattggaaaaagggcggctttctttacgaacaaaagtgcatagtttgttgccggcctttaaagatcgacgggtgacggtcttgcatctattgacgcacacgtccggtttaacgggctacattccgaatcggaatcaattatcggctgccgaattaaaaacggcgcttttgacgcaattaacggtcggcccaaattttggtgaaaaggttgtttacacggacattgatatgttgtatttgggctggatgattgaagccatctatcaaaaaccgattcaggatttgattcaagaactcgttttaaccccactcggtatgcaagccagtacgtttaatccggacagaagtttggcggtcccgactgaattgagtgccgaacgcggcttaatccagggcactgtccacgatccgaaaagtgcgattttacaaaatcatagtggtgcagccggcttgtttgctccattaaaagacgttgtccgctttgcccagttccaattagggcagttgaaggttgaccagccaccaatcagtcaggcgagtgttaagagtctctatcgtgattggacaccaaaacatctcgggcgctcactgggctgggatttgcgctttgagccgcaagaacaccagccactgatttatcacaccggttttaccggcacgttcatgctattggatcgcaagcggcaaacggggctgattgtcctgagtaatcgcattcatccaacggctgataatccggtctttttggaacaacgggatgcgattgtggcacaatttttagcggataatcacctagaaacaaaagcctagtcaaattcgcaaatttgcgtattatccgcttacatttgtggtaaaatgggactattgataaataaagcgcattaggagtgagtgaattgacagaacctttatttctaaaacctgtttttcaaaaaaaaatttggggtggtcgcaaattagctgaagccttcgattatgatttaccagacggcgatattggtgaatgttgggccatttcagcccatccccatggtcctagtaccatcgaaaatggcccattaaaagggctcacattagatcaagcatgggcaacccaccgcgaatatttcggtaatgcagaaggtaaagtattcccattgttaactaagattttggatgctgaagcaagtctttctgtccaagtgcacccagatgacgcttatgctgctgctcatgaaggtccaaccgaactcggtaagacggaatgttggtatattttggatgctgaaccaggtgcttatttaatctatggccaccatgccaagaccaaagcggaattaacagcaatgattgaagcaggcaagtgggatgatttactccgcaaagtgcccgttaagactggtgactttttctacgtcccaagtggcacgattcacgcattgaacaaagggattatggcgcttgaaacccaacaaagtagtgatacaacatatcggttatacgattatgatcgggttgatgctaagacgggcgaaaaacgcgaactacacttgaagcaatcaattgatacgacgattgtgccgcatcaagatcccgttttgaatattcaaacagaacatgttggagattcaacaatcacgacttatgtgcaaccaccaatgtcaccatttttcagtgtttaccaatggttagtgaagggcgacttacactttgatcggacaacggcaccctatactttagtctccgtggtcgatggtgaaggcgaactgattgccgatgggcaaacttacccaattcacaagaatatgcattttgtgttaccatttgatattaagtcatgggacttaaaaggtgacatgcaaattattgcgtcagaaccgggtaacaagtaaactgaatataaccaattgcaaccgcagccgtagttgcaattttttttaatgattaaaagagtaggatgacaagtatgcaaagacaaatcgaagcaattgaacaatttgtacgaacggaattggcagcagaacacagcggtcatggattcgatcacattcaacgggtcgtgaataatgcctgtttaattcagcaaaaagagttagctacggacctaacaacgattatcttggcggccttattgcatgatgtgattgatgaaaaaatcgcgactgatgttgaacaggctcgacaaaaggtaaaaactaaactaaccgaaaacggcatacaagatggccaacaaacggcaatttttgatattatcgaccacatgtccttttcgaaaaatctcaatcaacaccaaacgctaagtttagaagggcaaatcgttcaagatgcggatcggttagatgcaatcggcgcgattgggattgggcggaccttcatgtatggtggcgcacacgatggggttgcttatgatcctgagattcaaccacgggcggaattgacaaaggaaaactatcgcgaaccgtctaccgtgattaaccatttttatgagaaattatttaaattggcagcaacgatgaacacacaggcagcgcgcgaaatcgcgcaagcgcgaacggatttcatgcaccagtttgtggatcagtatttagcggagtggacagggcaacgctaaaaaacgaaacattgatatgcaaaagggcggtaacaatatttttgttagcgcccttttggatagttgtgttctgatcgtttaaacgtgttctgtaagtcatccgaacccagagccacacgttagccatcgaccgttagccagtcgttttggagtagttcgtgggttctcttttgcaggggtaaccacaattcagcgcggaggatattgatgagggattcccagaagaggcggtcctttttttgttggtcggtaatatgtaattcgatttcttgaccactttcagtggttgcgaaaactttatcatgattttcaatccgattaatttgaacggactcgactgctggcatttgatttaacataatgattcgctcctttttataggttaaagtcagtataccgagcaagtattgtgaaacgattatcattttatgaataaaaagtgtattttttcttgcgaaatgattaagacatcaaaaaagtcgaccgcataatggtcgactttttgatttgttaattttggacgcgtttgacgccggctgcatcgacttggtaacgtgattcttcgagtggtaagtcagcgatttgttgtaaatcaaattctggaaaacgccggctaaccgcaatcgataaaagtcgtttggctaaaacaccgttgtgcgtgagaattggaccatggaagtatgaaccaaatgtgtttttataaacacaaccttcggtgccgtcatcaccattgttgccgtgaccacgtttgatgtaaccaagtggtttttcatccttgcccaagaaagtccggccgttgtgattttcaaaaccgaggtaggtttcgttaaactcacggttttcgatgacaatatcaccgataaaacgattgttatcttggctcaatgtgtaatgatcaagtgcgccgattccaggaatcttgtcgccgtttgcgccaatatagtagtgacctaataattgataaccaccacagatggcaagcataacaccaccgttttcaatgtattcggtgagggctgcttttttgtcgttgaggtcttctgagatgattttttgttcgaagtcttggccaccgccgaagagaacgatatcgtaacgacttgcatcgaaatcttgaccgatactaatgacttctgtttcagtttgaatgccaacttttttggcatagtaatcaaggactaaaatattaccaagatcaccatatgtgttcattaaattgccgtatagatgacaaattcttaatgtctgggtcatactgatagtcctttcttaatataattggcagctgccagcttcttacgtagttgtaaaacagcggtataagttgctaatacataaacatgtttggttggggctgcttcaatggctgccatcgttgcatcgagttctttagtttcgtgtaattgatctgccgtgacaccggctacttttagccggaaagcgatatcgtcaccgcgttcgccaccggtaatcacggttggaatgttgtgtttgagtaagtcttcaaactcgccatcccaaatccaactcgtatcaattccatcggcatagttagcattaagcaacattgcgagtgaaaagtcttctggatcagaactgatcatttgtaagacttggtttaagccaaccggatttttaacgagtaccaatgtgaccgctttgtcttttaattgaatgacttcttgacggccaaagattcgtttgtcttcagtgaaggccttttgaattgctttcactggaatatcaaagaatcgaccgacactataggctgcaagtgcattatagatgttgtacatgccgccaattgaaatttcaaacggttcgttgttaatttcaaagtgtgaatttgtggggtgcatctgattgatggcagtgactgcttcgtctaattcaggtcgttggtagccacaattagggcagtaaaacttcccttggctggcataactgatgaatttgtaatgaatgatgtgatcacaaacggggcacaaaacgccgtctgtgttgcttggagccatcatttcgccatctggtaagtggttgaatccgtaataaatctttggattaggaagttcaaccgatgaaaagagaggcaagtcagcgttcataatgagggttgcctcaggaacgagtttgacgcccgctagaatcatattataagtcgtgtagatttcgccgaaacgatccatctgatcacggaaaatattcgtcatcacaatcgctttgggcttgatgtagtgacaaaggggttccacattggcttcatcgacttcgaggacggccaattgccgttgtcctttttgaggatgatctgctaaaaaggcggtggtcaacccttgcatcatgttcgagccactcgaattggtcatgatatgatcgtatttttgcttcaacgtctgcacagtgagtgcggtcgttaatgttttaccattggtaccggtaatgataatcacgtcgtagttcttggttaactgctttaacacagcaggatcgaacttggttgcgattttcccggggagggagctgccacctttcataaaggtatgtaaataccaatatgaaaaacgtcctgctgtaattgcaaatgagcttttaattgtcatgcttgccaccctttcaatgttcataatcatagcataaattctcaatttggacgatataaaaacgcatctgcaaataaaataagggaaactttagaatttaatagtggcgaatattgttgcctcgctgattttcaggtatactagattaaaatgtgcttaacataggggtgtttgagagtggcgcaattattttttagatatggtgcaatgaatagtggtaagtcgattgaaattttaaaagtcgcacacaattatgaagagcagaataaatcagtgatcatcctgacgagtgggattgataatcgcgacggggtggggattgtttcaagtcggattgggctcaaacgtgaggcgacaccgattttctcggatacgaatatctttgagttggtacaatcgactaatccggatgcagcgtgtgtcttgattgatgaatcacaatttttagaacggcatcacgtaatcgaagcggcgcaggtcgttgatgatttgaatatcccagtgatggcgtttgggttgaagaatgattttaagaatgaattattcgaaggctcgaaatacttattgctatttgccaataagattgaagaaatgaagaccatctgttggttctgtcgcaaaaaagcgattatgaacttgcgaatgaacgatggcaaaccggtttatacgggtgaacagattcaaatcgggggcaacgaagcatactaccccgtttgtcggaaacactattttaacccaccggtaacacaagagagtgaaaaggaaggctagtcattcatggataaaatgtttgaacaacttgatagtttgttagaccgctatgcggaattacaggaattaatgtctgatccagaagtgatcaacgaaaccagtcggtatatggaattgtctaaagaagaagcgggtttacgggaaattgttggtaaatacacgcgtttgaagactgtcttaaacgacattgcagaaagcgaagaattgttacgcgaatctaatgacccagaaatggaagaattagctaaagcggatttaagtgagttacaagatgaaaaggaacaattagaacaagacatcaagattttgatgttaccaacggatcctaacgatgaaaagaatatcatcatggaaattcgtggggctgctggtggcgacgaagccagtctctttgcaggtgatttgttgaatatgtatcaacgctacgctgaatcacaaaactggcaaactgaaatcatcgatgaaacggctacagaagtgggtggcttcaaagaagttgcgatgatgattaccggtaaaaatgtttattcgaagttaaaatatgaaaatggtgcgcaccgtgtccaacggatcccaaagaccgaatcacaaggtcgtgttcatacctcaacagcgactgttgcagttatgcctgaatatgatggggttgacgtgcagctcgatcctaaggatattcggactgacgtttatcgtgcctcaggtgctggtggtcaacatatcaataaaacctcttcagccgtgcggatgacgcatattccaaccgggattgtggttgcgatgcaagatcaacggtcacaacaacaaaaccgagtgaaggcaatgcaaatcttacagtcacgggtttatgatttctatgaatcacaaaatcaaagtgaatacgattcaagccggaagtcagcggttgggtctggggatcgttctgaacggattagaacatataactatccacaaaaccgagtgacggatcatcgaattggtttaacgttaaacaaattagatcggattatgaacggggaattaggcgacgtcattgatgcgttaattctttacgatcaaaccgaaaaattggagcaattacaagatggcacagctcacttatcttaaagccctgaattgggcttttttatttttagaagaacacgctaaagaacgtgaagcagcgcgctttttactactcggtcgtaaacattggacgacgacccaactggtcttgcattatcacgatgaaatgccgactgccgaatacgatcagtatcaagcagacttaaacgcgtttatcgctgatcaaccggcacaatacattttgggatatgctaatttttacggacgcgattttaaggtgacgccggcaacgcttattccacgacttgagacggaagaattggtagaatggatattagatgctacacaaccaaagaaccgaccacttaaagtgttggatgttgggacaggaacgggcgccattgcaattacccttgcctgtgagcatccagaatgggaagtgaccgcaattgatatttcactagaagcgattgctgttgcacaagcaaatgcgcgccaattaaacgcgcatgttaactttatcgtgggtgattttctaaccccagtgatgggccaacagtttgatgtgattgtgtctaatccgccatatattgcacaagatgaacggcatgtgatggatgcgtccgttttgaaatacgaacccgacttggccctatttgcagataataacggcttagcgttttatgaacggtttgctaaagaagtgcgtgcgtatttaaaaccagatgggcagctttatttagagttcggttatcagcaaaaagaggcgatcgttcggttgttcgaacatgaatcgaccgatgtagcggttacaatcaaaaaagatatggctaattggtctagaatggcccgtgtgggttacgatttcaatcggaatttggtatgatgtaaatcagaagtagagtaaggaaggcctataatggaaaccaagagatacacagtagaacagattgaacaagcagcagcagatttaaaagcgggcgaattgatttcatttccaactgagaccgtctatggtcttggggcagatgcgacgaatcctgaagcggttaagaaagtttatgccgctaaggggcgcccaagtgataatccgctaatcgtgcatgtagcaagtgttgcgacggttgagcattacgcagccggagttagtgatcgatttaagcaattagtcgacgctttttggcccggttcattgacaattattttgccgctaaaacatgcggcactagattcagttgtgacgggtggtttaaagaccgctgcctttagaatgccgaacaatgcggtgacgttagacttgattaaagcggccggtgtcccacttgtggggccttcagccaatacatcaggcaagcccagtccaaccactgccgatcacgttttacatgatctaaatggaaagattgccggtgtcattgatgatggtccaactggtgttgggttggaatcaacggtgattgatttaagtgttgcgacacccgttattttacgacccggtgttgtgactcaagaagccattgaacgtgtgattgggccgattatgacaaaccaccataaagttggcgcagctgaaacgccaaaggcaccaggcatgaaatacaaacactatgctccaaatgcacaggtttacatagtgccaacgccagatgaatttccggcggcggttaaatgggccagtcaacaaaatgtgccatttggtgttatggcggttgatacggtgttagggcagttatctgacgttaggtttaaagatcagttctctttaggtgattctgtagtgactgctagtcaacacttgtttgaaggattacggtattttgatttgaatcctgaggttaaaattatattagtgcaaggcttcgcaaaagagggtgtcggattagcgtatatgaatcgcctcgagaagtctgccggccaacaatactttacttcgaaataggcactattttaataggaagaggagtgattgtaaatgattgaacaaactgatccagcaatttacgaattgattaaaaaagaggaacaacgccaggtgcataatattgaactaattgcttctgaaaatattgtttccggagctgttcaagaagcacaaggtagcgtattaaccaataaatatgccgagggttatccgggcaaacggttttacggtggttgtgaatttatcgatcaaattgaatcactcgcgattgaacgtgctaaacaactttttaatgcagaacatgccaatgtacaaccgcactccggttcgcaggctaatatggcagtttaccaagcgcttttagaacccggtgataagattttagggatgaacctcacagatggcggtcatttaacccatgggtcaccgtttaacttcagtgggcaactttatcacttctatagttatggcgttgctgacgataacgaacgaatcgattatgatgcgctcgctgctaaagcggatgaaattcatcctaaaatgattgttgcaggggcatcagcatacagtcggacaattgacttcccaaggttacgcgccattgccgatcatgtcggtgcctatttaatggtcgatatggcacacattgctggtttagtggcaactggtgttcatccaagtccagtgccatatgccgatgtggtgaccacaacaacgcataaaacgttgcgtggacctcgtggtggaatgattttgtgtaaagcagaatatgccaaagcaattgactctgccatcttccctggtattcaaggtggaccgctcgaacatgtcattgcggcgaaagctgttgcatttggtgaagatttacaacctgaatttacagcatatacaaaacaaattgtggccaatgcgcaagcgatggctgccgttttcgaacaatctgacttagtacgtgtggtttcaggcgggactgacaatcatttaatgttactcgatttaacgcagagtggcttaaatgggaaggaagtccaagcatttttagatagtgtccacattaccgttaataagaataccattccttttgaaaaattaagtccatttaaggcaagtgggattcgaattgggaccccagcaatcacatcgcgcgggtttaaagaagcggattgtgaattgattgcgcaattaattttagaagtgattgaaaaacacgatcaattagacgccatgacgcgcattagtgcagatgttttagcgttgacggatcgttttccaatcacacaagctaaatttttagattaattaatgaataccgctagttttttgatgctatttacgctacaatagtaaacagaattttacgcggaagggagagtgactcggagaaggttttctttggagtcactctttttttgcgaaaaaaatttggactaaattcattgaatagaataggggcaaagtaaatggcaaaattcacagtattaaatcatccgttaattcaacacaaattaacgattatccggaataaggatacgggtactaaagttttccgcgaagtcgcaaacgaaatcgcagaattaatggtttatgaaatcacgcgcgatttagcaatggaagacgtagaagttgaaacaccaatggggcctgcaattgaaaaacaattgagcgggaaaaaattagccgttgtgccaattctgcgtgcaggtcttgggatggttgatggcgttttagaattaatcccagccgctaaagttggtcacattggtatgtaccgtgacgaaaaaacattacaaccccacgaatactttgttaaattaccaacagatatcgatcaacgacaactattcatcgttgatccaatgcttgcaactggtggctcagcaatcatggccatcgatgcccttaaaaaacgcggcgcaacgtcaatgcgccttgttgtactagtggctgcacctgaaggcgttaaagctgttcaagaagcccatccagatgttgacatctatgcagctggtcttgatgatcatttaaacgaggatggatacattgttcctggtttaggggatgcaggcgaccgtcttttcgggactaaatagccattaattaggtaccgataataaaagcgcgcaacacttgattttcctgtgttacgcgttttttttgccaaaaaagcaaccgttaataagtttaatcttttgatatgataatatttatggtatttgagtgcattgacaaaaaaataattagaaattagttagtatttgctttgtacttttaatttaatggtggtattatcatacttgtattgcggtgatgatttatgcttaatttttctacataaatattgctgtttttaggttcgttgtgcaactcgcgtagacgtagtcgttgatagagtggaatcaacaaataagcctaagggaggagggaattttgtggatgataaatatcccattattagcattttgggaattcgttttaatttagcaaactgtctatcggtcttagtaagtgcagttttggtttttgcactcgttttctttttatcaagaaaaattgcgcttaaaccgactaaacggcagaatattttggagtggatcattgattttacgaacggaatcgttaaaagtgcgatgcccggtgaagaaggtaaacaattttacttatttgcattcgtcatgttcatgttcgtatttatcagtaatcaacttggtttgattcttcaaattaaggtacatgatgtaacttggttgaagagtccaacggccaatccgattatcactatgtcgcttgcgatgatcgtcttagtgattgcgcactactttagtgttgaacggttagggtttggtaattacatgaagagttatattaaaccggtaggatttttcttaccaattaatatcatcgaacaatttaccaatttcttaacgttgtccttgcgtttgtacgggaacatttttgcgggtgaagttttactaagtttattagttaaaatggccttctcacatggaccagcaacgatgcttgtgacggcaccgatccaaatggtttggcaaggattctccgtctttatcggggcaatccaagcatatgtatttgtaacattatcgatagtctatatttcagaaaaagttgaaatggaagactaaaaattaggaggaaaaaacatgaactatttagcagcagctatcgcagctggtttagcagcattcgcagcatcatatggtaacggtaaggttatctcaaaaacaatcgaaagtatggcacgccaaccagaattatcagcagaattacgctcaacaatgtttatcggtgttgggttgattgaagctgttccaattctttctatcgtcgtttctttcttgatcttatttagttaatccgagtgaatctaaattttcgctttaaaaattagtcagtaagtcaaggaaggagtgtcaatagatgtttagtaatttaatcgttggtgcttctgaagcctaccttggagattcacttttcgtattagttgtctttatcattttagtcgctttagttggtaaatttgcgttcggacctgtttcaaaaatgatgcaagctcgttctgacaaaattacaaacgacttagataacgccactcaatcacgtgaagatgctgccaaattagcagcacaacgcgcaacagagttgaagaattctaagtcagaagcagttgaaattgtgaatacagccaagcgaaatggtgaaaaacaacgcgaaggcatggtcacacttgctcaagaagaagtccaaactttaaaacaaaatgctaaaaaagacatcgaacaatctcgtttagatgcgttaaacagtgcgagagatgatgttgctcaactatctattgaaattgcttctaaactcattaagaaagaattgtcagttactgatcaaaagtcattgatcaattcctatattgaagggttggacaagcaaaatgaaactagataaatatgcagtcggacaacgctatgcaaaggcattattttcccttgcagaacaagagcaacaatttgaaagtatccatgaagagatacaagcactcgagactattttcaatgacaacccaagattgggtgcagttctgactgatacgactttatctggattgaaacaacgtgagcttctaaagagcctttccggtgaatttagtacactcatgcaacactttttaagccttgtttttgactatcaaagaatggctgagatgccatacattattgcggcctacgaagatctttatgatcaaaagatggggattgcacacgctaaggtaacgtcagccgttgctttagatggtgatcaaatcgcaaagattagccaaagctacgctaaacgcgaaggtctcaatcaggtcttagtggaaagtatcgttgatccagatattattggtgggattgtactggaatcgaatcacaaggtgatcgatggcagtgttaaacatggcttagatcaaattaagtcattactattgaaatagtcaatcgttgataaagaggtgaacctgatgagcatcaaaactgaggaaatcagtgcattaattaaacaacaacttgcaaattataatgaagatttagccgttgaagaagtcggtactgtcacttatgttggtgatgggattgcacgtgctcacggtttagaaaacgccctttcaagtgaattgctagaattttctaacggttcatacggggttgcgcaaaacttggaaaccaacgatgttgggattatcatcttaggtgaatatgaaaacattcgtgaaggtgaccaagttaaacgaacaggtcggattatggaagtgcctgttggcgatgctttaattggtcgtgttgttaatccattgggtcaacccgtggacggcaaaggcgaaattaaaacggacaaaactcgtccaatcgaaaagaaggcccctggcgttatggcacgtcaatctgtttcagaacctttacaaacaggtttgaaagccattgatgctttggtaccaatcggtcgtggtcaacgtgaattaattatcggggatcgtaagactggtaaaacatctgttgcgattgatacgattattaatcaaaaagatcaagacatgatttgtatctacgttgcgatcggtcaaaaagaatcaaccgttagagcgcaagtggaaaccttacgtcgttacggcgctatggattataccatcgttgtcgaagctggtcctagtcaaccagcaccattactctacattgcaccatatgctggtgcagcgatgggtgaagaattcatgtataacggcaagcacgtcttaatcgtctatgatgatttaagtaaacaagctgctgcttatcgtgaaatttcattacttttgagaagacctccaggccgtgaagcttaccctggtgatatcttctacttacattcacgtttattggaacgggctgctaagttaagtgatgaattaggtggcggttcaatgactgctttaccaatcatcgaaacacaagctggggacatctcagcttatatcccaactaacgttatttccatcactgatggtcagatcttcttggaaagtgatttattctattcaggaacacgtccagcgattgatgctgggtcatctgtttctcgtgttgggggcgcagcgcaaacgaaggcgatgaagaaggtttctgggacattacgtcttgatctttcatcataccgtgaacttgaagcctttacgcaattcggttcagacttggatgcggcaacacaagcgaaattaaatcgtggtaaacggactgttgaagttttgaaacaaccacttcacaaaccattaccattcgaacaacaaacaacgattctttatgcattaacacacggctttattgatgacgttccagttgacgatatcatgcaatatgaaagtcaattgagcgattatcttgaaagtaacgcaaaggacttgatggacactatccgtcaaaccgctgcattgccagatacagataagttagatgctgctatcaaatccttcacagaaggttttgtcggcgctgaagctactgctgacaatcaagactcaggacagtaaggggtgaattaattggctgaatctttaatggatatcaaacgaagaatcgcctctactaaaaaaactgggcaaattacgagtgctatgcaaatggtctctggtgcaaaactttctcagattgaaaaaaattcaatcgcttatcaacaatatacgaataagattcgagaaatcgtcacgcatttggctgcaagtcaattaattgcaagtgcacgtcaaaaaagtaccgctaaagcagcagaagctactaacggtacttcacagaaatcattgcggcatgacattacgttaagtaatttgttagtggaaagaccaatcaaaaagaccggttatttggtcatcacgagtgatcgtggattggttggcgcttataacagctcaatcttaaaagcaatggttgaaatgatttcagaaaaccacaagtctgccgatgaatatgctattttagccgttggtggcactggtgctgatttctttaaagcacggcaaatgaacttatcctacgaatatcgtggtgtaagtgatgtgccatcatttaatgaagtccgtgaaatcatcaaaacagctgttgcaatgtatgatagcggcgtgtttgacgagttgtacgtttgttacaaccaccatgtcaactcactgacatctgcttttcgagctgaaaaaatgctacctattaccgacttggatgtttcagaagtcactgataaagatcaagaatacatcacagaaccttctgttgatgatgccttagatgccattctaccgcaatacgctgaaagtttgatttacggcgcactacttgattctaaaacagctgaacattctgcttccatgacggcgatgaagagtgccactgataatgctaataatttaatttctgatttatcaattaaatttaaccgggcacgtcaagcacagattactacagaaatcaccgaaattgtcggtggtgcggcagcattagaataagaaacgcgggaggaaaataacaactatgagtatgggaaaagttgtccaagttattggtcccgttgtcgatgtcgaattttctttagatacgactttaccagatatcaataatgccttggttgtcaacaaagggaacgacgaatctgtcgtcttagaagtggcacttgaattaggtgatggggtaatgcgtactatttcaatggaatcaactgacggtttacgtcgggggatggctgttgaagacactggtcgtgcaattaacgtaccagttggtaaagaaactttaggacgggtatttaacgttcttggtgaaacaatcgatggcggcgaagaatttcctgcagattttagacgggacagtatccaccgttctgcacctaaatttgaggaattaaatacaagttcagaaattcttgaaacagggattaaggttatcgatttacttgccccttatttacgaggtgggaaaattggtttgtttggtggtgccggtgttggtaaaaccgttttaatccaagaattaatccataatatcgctgaagaacatggtggtatttctgtctttactggtgttggtgaacgaacacgtgaaggtaatgacttatactttgaaatgaaagaatcaggcgttttggaaaagacagcgatggttttcggtcaaatgaatgaatcacctggcgctcgtatgcgagttgccttgactggtttaacaattgctgaatactttcgtgatgttgaaggccaagatgtgttattgttcatcgataacattttccgattcactcaagctggttcagaagtttctgccttattaggacggatgccttctgccgttggttaccaaccaacattggcaacagaaatgggccaattgcaagaacgaatcacgtctactaaaaaaggttcagttacatcaatccaagccatttatgtgcctgctgatgattatactgatcctgcgcctgcaacaactttcgcgcatttggatgctacaactaacttggatcgtaaattaacacaacaggggatttatcctgctgttaacccactagaatcaacttctagtgctttggatccagaaattgttggcgaagaacattacgaagttgcttcagaagtgcaacacgtcttacaacggtatcgtgaattacaagatatcatctcgatcttagggatggatgaattatctgatgatgaaaagattatcgttgcgcgtgctcgtcggattcaattcttcttatcacaaaacttccacgttgccgaagccttcacaggccaagccggctcatacgtgccagtaaaagatacagtggcaggcttcaaaggcatcttagcgggtgactatgatgatgtccctgaagaagcattccggcttgtcgggaatattgatgctgcattagcaaaagctaaagaattgggttatacaccatccgaacaagaaacgaaacaagcttagaaaggggcgttaatgatggcagaagaacaaaaggtattaaccgttaatatcgtgaccccaagtgggattgtctatgatcaccacgcaacattgttggttgtaccagcgatggccgggcaacttggtattatggctaatcatgagccaattattacccctttagaaattggtgagattcgcgttaaacggactgatgatccagcacgtgaagacgcaattgcggtcaatggtgggttcatggaagtgagccataacgttgcttcaatcgttgccgatagtgctgaacgggcgcgtgatattgatattaggcgtgcgcaaagtgccaaggaacgtgctcaaaacgcaattaaaacagcgtccgaacataatgatactgacgaattacgccgggctcaaattgcactgcaacgtgcgataaaccggattaacgttaagaatcacttattgtaggattcaaaaagccttaaacctgaatggtttaaggctttttttgtttcttaagattcagtctggtgggcagacaaatcctatttcggtatgttacaatgtttgcatatcacaaaaggggcgttatttaagtgcaatcaatcgggttacaggcagttatttcaattattagccatattggttttattttaatcagtttttatggcttacaatcaatccggtttgagcaatttttcaaaccgaatcatatccgtcaagtacagattgtcatagtatttctcgctattgtgatgggctacaccgttagccaattctttttagaaataatcgcgcaggctaaaaatgtgatttttttagtcccataaactagcagtcttattcggagggaaactcttggaaaaattgattatacaaggcggtcaacgattagttggcgaagttcaaatcgaaggcgccaaaaacgcagtattaccaattatggcggctgccttactagcaaccgacggacccgttcaattaacgaacgttcctattttatctgatgtcttcatgatgcaagatgtattaaagagtttagatgctaaagttgagtttgatgaacaacggaaccaattaacaatcgatgccagtggtgatttgaattttgaagcagcttttgaatatgtttcaaaaatgcgtgcttccatcgttgtgatggggccgttattagcgcgcttaggtcacgcacgagttgcgatgccaggtggttgtgctatcggttcgcggcctgttgatttacatttgaagggttttgaagcacttggtgcaaccattcatcaaaatcatggttacattgaagctaaagcagaacgcctagtgggaactaatatttacttagattttcctagtgttggtgcgacacaaaacatcatgatggctgcgacaatggctgaagggacaacggtgattgaaaacgttgctcgtgaacctgaaattgtggatcttgctaatgtcttaaacaagatgggtgcgaacgtttttggcgccggaactgagacaattcgggtggaaggcgtaaccgctttacacgggacggatcacagtatcgtgcaagatcggattgaagccggaaccttcatggtagccgctgcggcaacacaaggaaatgtcttgattaaagaagcgattgctgaacacaataaaccactcctatcaaaattagtggaaatgggtgcggaagtgattgacgaagaagctggtgttcgaattattggtcccgctgaattaaaggcatgtaatatcaagacgctaccttatccaggctttccaactgatatgcaagcacaaatgacgacacttcaattacttgctaagaagacgagtgttatgaccgaaacggtatttgaaaatcgtttcatgcatttggaagaactccgccgaatgaatgcggattatcaaattgaaggtcaatcagttgtgctttatggcgatacacatttcaatggggctgaagtggctgcaaccgatttaagagctgccgcagcacttgtcattgctgggttagtagctaatggtgaaacgttggttacgaaccttcaatacatggaccggggttactatcatttccatcaaaaattacgggcacttggggcacatattagtcgagctgattttgatgctgccggtcaccggattaaacaagcaaaacgtgcataaaacagactagcggcgcctgctatttcagcggacgtcgcttttttattttgccaaatcaggatactaaaggtacctgtcttatggtataatgatttactgaatatagttctcggaaggagcaacaccaaatggctaaagatatcgggattgacttgggaactgccaacgtcttaattaacgttaagggaaaaggcattgtcttaaacgaaccttcagttgttgcgattgatacccaaaccaaaaaagttttagcagttggctcagaagcgtatcggatggttggccggacacctggcaatatccacgctgtccgtccattaaaggatggggtcatcgctgatttcgacattacagaagaaatgttagcgtattttattaataaattaaatgtaaagggcttcctatcaaaacctaatattttgatttgctgcccaacaaatattacatcaattgaacaaaaagcaattgttgaagctgctgaaaaatcaggtggcggcaaagtcttcttggaattagaaccaaaagtcgcggctgtaggtgctggcatggatatttttcaaccacgcggtaacatggttattgatatcggtggtgggaccagtgacgtcgctgtgctttcaatgggtgaagtggtcacaagtcgttcattgcgtcttgcaggcgataagatgaatagtgaaattgccgcatacgttaagaagaaacataatctattaatcggtgaacatacggctgaaacaattaagttaacaattggtaacgtttggcatgctgatgcgagtgagtcacttgagattcgtggccgggacatggtaagtgggttgccacaatctgtctcaattagtgcagatgaagttgaatcagccttgcatgaaacaatgatggaaattattgcggctgccaaagaagtgttagaagtgacaccaccagaattatctgcagatattattgatcggggaatcatgttaacgggtggcggtgctttattacgcaatatcgctagcttattctcagaacatttgaaggttccggtggtcttagcagaaaatccattggatgctgttgctttagggactggcatcttattagataatattgaacataaacgggcttattaagccgcattctattaaagaaggattgtgattgtgtgtatcaatcaaattttgacgaacacgtcaaacccgttttaaagaaaattttattggttttcgtgctcataattattgcgttattagttggtcagatgattggttttgcaattggcggccagaatccatttgccgttttcttgcctagcacatggagtcatattattaatttcttgcagtagcatgcgctaaagtgaggtagataaattgcggaaaatattgattggattggtccgtttctatcagaagggaatttcaccattattaccaccgagttgccgatattacccaacatgttcgagttacatgattcaagcaatccaaaaacatggtgctattttgggtttaatcatgggcatcggtcgtatattgcgttgtcacccgtttgtacggggcggctatgatccagtaccagatcatttcaccgttttgcgcaatcgacagcaagacgagtcacaaaagtaagtcaaagaagttaggggttcaacataactatgtcaaaaaaagaacaaaaaattactgtcacaattgatgacatcaaacgtaatggccaagaaatgacaagcgtcatggtcggcaaaaatgaaattggtgtgattgtagaagatagcgctaagaaacgttttgaagcaactgttgaagggactggtcaaagtatcattactaagacccacgacgatgcagttaacgaattactacgggagtaccacttacaccaaggttaattcttaagaattaattagaattacagtaacccggcagaattctggccgggttatttatataatgagagcagaattgattgaaggagacttagcatgccaaaggaagtagaaacaacagaagattcctcgcgagttgattatggaatcgtcttttcagtctttatgctagcgttgattggcttgatgtcaatctatgtggcaacgtcacatgatacatcaggtgcgagttcaactcgagccgttattatgcaagctgcatggtacgtgattggtggaattgcgattgtcgcaattatgcagtttgattcagaacaactatggcggattgcaccactggcttatgggttagggattttcctcttgattgccgttttaatcttttataatcgggcagtcgccttgcaaactggggcaaagagttggttctctcttggaccaatctcatttcaaccatctgaagtcatgaaaccggcatatattttgatgttgggcagggtcgttactcaacacaatacggcttatccagaacacacggttaagacggattggatgttacttggacgaatgttactatggacacttccagtgatggtcctattgaaattacaaaatgactttgggaccttattagtgttcgttgccatcttaggtgggattgtgcttgtctcaggtgtgacctggaagattttagccccagccattgctgtcttagtcgctgttgggggcacggcccttacactagcggcgacaacccctggccgggtaatcttgacgcatctgggctttaaaacgtaccaattcaatcgaattgatgcttggctgcatccttttgataatactgccagtaccagtttacaattatcgcagagtttaaaagcgattgggtctggtcagctatttgggaaaggcttcaatcaagtgcaagtccatgtgccagtacgtgaatccgatatgattttctctgtcattggtgagaacttcggctttgtcggttcatgttttgtgattcttttgtacttcttgttgatttaccaaatgattcgggtcacatttgatacgaagaatgaattttacgcgtatgtctcaactggggtcatcatgatgatcttattccatgttttcgaaaacattgggatgagcgttggtttattaccattgacagggattccattgccgttcatctcacaagggggctcgtcattattggggaacctaattggcgttgggtttatcatgtcgatgcggtaccattataagagttacatgttcagtgaagctgaagatactttctaggagtgaatgacggatgacgatgaataataatgattatttttggacagaggaaattgcagcatcgattagaagaattgggatcaccaaagccgcacaaaatgagtttgggttaatcaagtttgttgatgttccaatcgtggggcaaaaattgacggctaatgaaaccttagtggccattgaagctgagaagatggtacaagatcttgacagtccactagctggtgaattagtaaacgtcaacacaccgttagctgataatccggaattattaaatgcagataacgaaaaagatgcgtggattgctgacattcgggtcgattaggccattacttaaacaataatctgatttttttgaatagtcttgcttgacttttaattgaactttaattatgatgggtactacttaatacaagcgatgaaaagatgagtaatttagtcagtagcattttaagagagtccggtcaggtgcaagcggataatgtgaaagctagatgaatatggtctttgagcaattcatttggtaaggtttaactgagccgaatgcgggggttgcccgatatagcgaacgagtatcaatatcaatcgggtactttgtaaggcgattactgtgaggtaatcgtaaattaaggtggtaacacgcatttagcgtcctttctctcatttatttgagaggaaggatttttttttggcattttttaaaagaagagggagcgattagtatgttgacattaaaacaagtgggtaaaacctttgagcgagaacaaaaaacattcgccgcactaacggatgtctcgttgaacattgaagcgggcgaaatctacgggattatcggttattccggcgctggtaagagtacgttgatccgactcttgaatggacttgaaaagccaacgactggggatgtgctcgttgagggccagtcaattgtggggttgagcgaacaagcaatgcggccgattcggcagaaaattggtatgattttccaacactttaacttactctggtcaaagacagtgttagaaaacatcatgttgccactaaaattagccggggtacctaaggcagaacgacaaatcaaagcccgcgcattattaaagattgttgaattgacccatttagaagcggcctatccaagcgaactatcgggcggtcagaaacaacgggtcgcaattgcacgagccttgattagtgacccgaagattctgttatgtgatgaagcgactagcgcccttgatccgaaaacaacgaattcaatcttaacgttactggctaagattaatcgtgaaatggggattacaatcgttcttgtcacccatgaaatggatgcggtgcggcggatttgccaacgaattgcggtcatggaaaatgggcggttaatcgaagaagggactgtgcacgaaatctttgaaaaaccacaaatggctgcaaccaaggcatttgttgctgaatccttagtggtgtcgccaagtgaaacggccgcttcgattgatcaactgttagaacgggttccaaatggtacaatcgtccaactgcgatttaacgaagaacaatcgagtcaaccggtgatcggtcgcttgatgcgtcaatacccagcagtcgaaatcagtgtcatcagtgggagtttacaacaaaccattaatggcgcacttggctatttatacattcaaattcaagctaatccaagtgatttaaaggcagtccttgcagaattagcacaacaaacaatcgaagttgaggtggtacgtcatggataacgtaaacggatttcaatcctattttcaatttaagcaagtgaactggccaagtatgtggcaagcaacttttgaaacagtttggttaacaattgtcagtgttttattggtggcagttcttggattcgcactcgggttagttctttatcaaacaaacgcgagtggtggtcgagtgaatcggctgttgaatggcattgtggctttattagtgaacgtctttcgttccattccattcatcattttaatcgtcttgttgattccattgacaaaaggcttgatgggcacgatgattggcccgaaagctgcgattccagcgttaatcatctcagccgcgcccttttatgcacgactcgttgaattagcttttcgggaagtcgatggcggtgtgcttgaagccacccgttcaatgggcgcttcaaaagtccaaatcgtctggcaagtccttttaccagaaagcatgccggcgcttgtttccggcttaaccgtcaccgcaatttcacttgttggttataccgcaatggcgggggtgattggtgccggtggactgggaaatcttgcttaccaagatggtttccaagctaaccaaaatgcgattacgttagtcgcaaccgtcattattttaatcatcgtcttcatttgtcaaaaaacgggcgacttggttgttcaacacattgatcatcgttaatttaaaaggaggagttttcatgaaaaaacacagtttaggattattagcagcagtcttcttattagcgggcgcacttgccgcttgtggtaacaaagaagcgaagtcagacagcaacacaatcgtcgttggggcatccgcaattccacacgccgcgattttgaaacacgttcaaccggagttgaaaaaagaaggcatcaacctcaaagtaaaagtcttcagcgattatgttttacccaataaagctttagcgagtggcgaattagatgcgaactactaccaacacaaaccctttttgaagaaggccaataaagataacggctacgacttagtcagtgttggcagtattcacttagaaccgctcggcttatacagtaaacaagttaaaaaattgagtgatgtgaaatcaggtgcgaaagtattagtttcaagcagccagccagactggggccgtgttttaacaattttaaaagacggtggcttaatcaccttgaaatcgggcgtaaatgctgaaaacgcaacgtttaaagacatcgctagcaatcccaaacacctcaagtttgagtacacattcgaaccaaaactcatgcctgaacttttgaagaatgatgaaggcaccttagtggcgattaactcgaactatgctgtgcaagccggtctcaaccctgaaaaggatgctgtggcccttgaaaagcaatcttcgccatttgccaacattgttgtgacaaataaaaaagaccgcaataacccagctatcaagaagctcgttaaagtgctcaaatcaaaatcaacgcaagaatggattaagaataaatggcacggcgcagtgttaccagttgaataatgatcaaagacaagtcattaagacttgtctttttttgctgttagcatgtgtaattcttaatttaattggaaaaagcgggttaaattggatatactatcattgaatataaacttttagggggagtaagaatgagtcgtccgtataatattggtttagatattggtactagttcaattgggtggtcagtggttgatgaccaaagtaagttggtcagtgtaagaggtaaatatggttatggggttcgtttatacgatgaaggacaaacagccgcagaacggcgcagctttagaacaacacgtcgccgattaaaacgacgtaaatggcggttaggattgttaagagaaatctttgaaccctatatcacgccggttgatgatacttttttcttgcggcaaaaacaatcaaacctaagtccgaaggatcagcgaaagttacatccacagacaagtttatttaatgatcgaacagatcgggcattctatgacgattatccaacgatttaccatttaagatataggctaatgaccgagaaacgtcaatttgatattcgcgagatttatttagcgatgcatcatattgtgaagtatcgcgggcactttttaaatgaagcgcccgtctcatcctttaagagtagcgaaattaatttagtggctcattttgacagactaaacacgatttttgctgacttgttcagtgaatctggctttcaactagagacggataaattagtggaggtcaaagcgctcttattggataatcaacaaagtgctagcaatcggcaaagacaagcattatcactgatttatacgccaagtacgaataaggcagttgaaaagcagaataaggcgattgcgacagaattattaaaagcaatcttggggttaaaagcgaagtttaatgtgcttactgggatcgaagccgaagatgttaaagcatggacactcacttttaatgcagaaaactttgatgaagaaatggtcaagttagagagtagtcttgatgataatgcccatcaaattatcgaaagcctacaggaactttattctggtgttctattggcgggaatcgttcccgaaaatcaatcattgtcgcaagcgatgatcacgaagtatgacgatcatcaaaagcatttaaaaatgctaaaagcggtacgggaagcgttagcacctggagaccgacagagattaaagcaggcttatgaccaatatgttgatggtcaagaaaatacgaaggcctattcgaaggaagatttttacggagatatcacaaaagccttaaagaacaacccagatcatccgattgtgagtgaaattaaaaaattaattgaacttgatcaatttatgccaaaacaacggaccaaagataatggggcaatcccgcgtcaactacatcaacaggaattagaccggattattgagaaccaacaacaatactatccctggttagcggaacttaatcccaattctaaacggcaaacagtcgctaaatataaattggacgaattagtggcctttagagtaccatactatgtggggcccctgattacggctgagcagcaacaacaaagctccgatgcgaaatttgcgtggatgattcgtaaagcagaaggccggattacaccgtggaacttcgatgataaagtggaccgtcaagcatccgctaatgaattcattaagcgcatgacaacgactgatacttatttattggctgaagatgtactccctaaacagagcttaatttatcaacggtttgaagtgttgaatgaattaaacggacttaagattgatgaccaaccgattacgacggagttgaaacaagcaatatttacggatttatttatgcaaaaaataagtgtaacagtgaaaaatattcaggattacttggtatcaaaaaagcgctatgcaagtcgtcccgcaattactggtctatccgatgagaacaaatttaatagtcgattaagcacgtatcatgacttaaagaagattgttggagatgcggttgatgatgttgataaacaagccgatttggaaaaatgtattgaatggtcaacgatttttgaagacggcaaaatatatagcgccaaattgaatgaaatcgattggttaacggatcagcaacgtgtgcaattagctgctaaacgctaccgcggttggggtcgtttgtcggctaaattattaacgcaaatcgtcaatgcgaatggacaacgaattatggacttactctgggatacaacggataacttcatgcggattgtgcactctgaagactttgataaattaattactgaagctaatcaaatgatgctagctgaaaatgatgtacaagatgttatcaatgatttatatacgtcaccacagaataaaaaagcgctctgccagattctgcttgttgtcaatgacattcaaaaggccatgaaaggccaggcgccagaacggatattgattgaatttgcgcgcgaagatgaagtgaatccacgactttcggtgcaacgtaagcgccaagttgaacaagtctatcaaaatatcagcaatgaattgctaaataatactgaaatcagaaatgaacttaaggatttatcgaattctgcattgagcaatacgcgcttattcttgtacttcatgcagggtggtcgggatatgtatacgggtgattcgttgaatattgatcgtttatcgacgtacgatattgatcatatcttgccacagtcgtttgtgaaggataattcgttagataaccgagttttagtttctcaaaaaatgaaccgtagcaaagcagatcaagtaccgaccgactttacaagcgttgaacttggacaaaagatgcagattcaatgggaacagatgttgcgagctgggttaattaccaagaaaaaatatgataacttaacgttaaatccggatcatatcagtaaatacgccatgaagggctttattaatcggcaattagtagaaacacgccaagtcattaagttagcgacaaatctattgatggaacaatatggtgaagacaatattgagttaattacggttaagagtgggttaacccatcaaatgcgaacagaattcgattttccgaagaatcgtaatctaaataaccatcatcatgcattcgatgcttatctgaccgcattcgttggtctgtatctattgaagcgctatcctaaattaaaaccttattttgtatacggtgagtatcagaaggcaagtcagcaagataagtggcgtaactttaattttttaaatggtctaaagaaagacgaattggttgatgaaaatactgaagcggttatttgggataaagaatccggtctagcttacttgaataaaatttatcagtttaagaagattctagtgactcgcgaagtgcatgaaaattcgggagcgctatttaatcaaacgctctatgcggctaaagatgataaatcaagtggtcagggcggcaagcaattgattcccgctaaacaagatcgaccaactgcactctatggtgggtactcagggaagaccgttgcctacatgtgtattgtacgcattaaaaataaaaagggcgatctctataaagtctgtggtgttgagacaagttggctagcgcaacttaaacaactgacggatgaagactcacaaaaggcattcttaaagcaaaaaattagtccgcaatttacaaaagtgaaaaaacaaaaaggaacgattgtgaaagtggtcgaagactttgaagtcattgcaccacatatcctaatcaatcaacgtttcttcgataatggtcaagaattgacattgggctctgcgacgtataaacacaatgagcaggaattgattcttgataaaacggctgttaagttattaaatggcgcgctacctttaacacagtctgaagaacttgctgaacaagtttatgatgaaatcttagatcaagtgatgcactatttcccactgtatgatactaatcaattcagagctaaattatctacgggtaaagcagcctttatgaagttgccgtggaagagtatatgggatggtaataagatgacacagattggtcaacagatcatattagatagaatcttgattgggttacatgcaaatgctgcgatgagtgatcttaaagtattgaaaatgaccacgccatttggaatgatacagcaatccacaggaattacactgtcggctgatacccaaattatctatcaatctccaaccggtttattcgaacgacgagtagctttaagggatttataaataaataaagctagcctgtcattagtgtaatgatgggctagctttttggtttgaaggcataaaaaaaggcctcataagaggcttagaatagaaaacttggtccgaagaccttgtttgattttaactcagagtatcaaatcaatgagtatttcgattgagtgtatcaagctcaacaacagcattatagcatgttatcattttgaaaacaaggatgtagggggtaaatttttatgagttggcgaacagttgtgatttcacaacatgcaaaggtttcttattctggacggaagattattgtccagacaaaagatgcaacacaccaagtaccaattgatgatatccaaattttgttagttgcgactacccaggccgttttaacggcatcggcgattactgagttgagtgaagctggcgctaagattatttttacaggcaaagacggtaatccaacttgcgaaacaattgcggattatccaggaaatcgtagtctcgcgtcgatccagcaacaggttgaatggggaacggggttgaaagaaaccttatggacggcgattattcaagccaaaatagcgatgcaaattcaatgtgcacaattgttaggaaaggatattgaagacttaacaacagaagctgatgcaatggtatttgctgatcgaacaaatcgggaagccgtgattgcgcgcaagtattttcagttagtttttgataaagactttgttcgaacggagtacagtcccattaatgcagcccttaattatggttatagtttgttgttatcagccgttaatcgcgaaattgtttgtaatggctatttaacacagtttggcattcatcatcacaatggcgtcagtgattttaatttgggttccgatctaatggaaccttttcgaccagtgattgattattgggtggcacatcaaaagtttaatgaattaacccctgatgttaaatttggtttagtggagttactgaatcttgagctagaatataatggacagatcacaattcttagaaacgcactcactaaacacgtacagaattgtttgaaattcatgacaactccgaaagaagagtttgaagtaaaggtggtaatgactcacgaggtaccgaataatgcgcttattagtcatgtttgatttaccagttgaaacgagcgaggatcgcaaggcataccgtcattttagaaaagcgctgcttaacgaaggttttttaatgattcaatattctgtttatgttcgagtttgtgtcagcaaacaatcggcgcagtttatcgagaaccgaattgctggctttactccgcctgcaggcttagtacaaacgttgatggttactgagcaacaatataataaaatgcatttcttagtgggcgaatcgagtgatgacgtccgtaattctgctgagaggacgttaattctatgaacattactttttatccataccacccctttagcgttcagaataataaaataacggtttgcagtacaagtagtccagaagtgtataccaaactcattattggaatgtccggcgcacaagagaccgttaaatttagcaatgatcaatacgaattaatggattattcaaaggctgttatttggggtggggatgtggcagcaattaatttgaatcatctatttcaaaatcggttgattaaaaaattcgccgccgacttaacggatcagcagcgccagaaattaactcagttagatagtgagattcgttcaacgattttggatgcggcctttatgtatgaattgaccttagatgtcaatcaggaatgggatcttcaaagaatgattaagttctataatttacaattttcgactgtcgtccaacatgacccatatggtataattgagagtatagtacagacagcagtagagttaaatgaatcaaaaataatcacgttgatcaacgtttcgcactatctcagtatcaaccaatttaatgaattggtgaggttggtggcgacattgaatgtgaaactctttctcattgaattttcagaagaggttaaatctgatcagtaccagaaatgttattattatcacatcgataatgattatgtcgaatggcgctatgaataaaatgaaattctgatgaaaaaacgatggttttagaagagtatcaaatcaatgagtagttcaactggttcttcttggtgcgaaaggccttccgcgttttagaagagtatcaaatcaatgagtagttcaacgcccccctaaccatttatgaacggaatagagttttagaagagtatcaaatcaatgagtagttcaaccaacaatccgcaaccgttcatcaatccccagttttagaagagtatcaaatcaatgagtagttcaacttatcccattctaccgtttagctaacaaccgttttagaagagtatcaaatcaatgagtagttcaaccacaaacgtttgggtttggaaatgagcctagttttagaagagtatcaaatcaatgagtagttcaactatatctgaaagcaatcgatgataagacaagttttagaagagtatcaaatcaatgagtagttcaacaatcagccgatcacgttcgtcatcaacccagttttagaagagtatcaaatcaatgagtagttcaacataatgcttcactatgctgggatttgtgatgttttagaagagtatcaaatcaatgagtagttcaactgacggccagcataaggcatttcccaaacagttttagaagagtatcaaatcaatgagtagttcaacagtcgtcaccctcgacgtatccgctcttttgttttagaagagtatcaaatcaatgagtagttcaactacacgagaacattaacagctggtgctactgttttagaagagtatcaaatcaatgagtagttcaacggacaagaggtactgttgattgcacttaatgttttagaagagtatcaaatcaatgagtagttcaactgccaggtttgccgtaaatcatgactcgaagttttagaagagtatcaaatcaatgagtagttcaaccgcaagaaagctcacgcgctgctgtagcctgttttagaagagtatcaaatcaatgagtagttcaacacggcaatagctgttgtattaccatcaccagttttagaagagtatcaaatcaatgagtagttcaactgcattgcttaattctttgttaactcgatagttttagaagagtatcaaatcaatgagtagttcaacccacatagcctgaattaatagccttagattgttttagaagagtatcaaatcaatgagtagttcaactcatctgcaacaggaacagcctcaatggcggttttagaagagtatcaaatcaatgagtagttcaacacgatgcaactaaggcgagcgaacgtgacggttttagaagagtatcaaatcaatgagtagttcaactaatcacgatgcagaaactcattatcgccagttttagaagagtatcaaatcaatgagtagttcaaccagctattgacgatggtatcagctactcaggttttagaagagtatcaaatcaatgagtagttcaacgagattaaaggctataaagttgctcgattagttttagaagagtatcaaatcaatgagtagttcaacacacaaacgcttatgacaaaaccacgtttggttttagaagagtatcaaatcaatgagtagttcaacataagcggttgggctgcattccacaatccagttttagaagagtatcaaatcaatgagtagttcaacgcatctataactttgatttcgcctacttatgttttagaagagtatcaaatcaatgagtagttcaacaatggttacaacaagctaacagcgatttaagttttagaagagtatcaaatcaatgagtagttcaactggataaacttgatagttttgttaagaattgttttagaagagtatcaaatcaatgagtagttcaactattcttgaggcaatgtcgcaccagcagcagttttagaagagtatcaaatcaatgagtagttcaaccggtattgtggctgaccaaatggctcaacggttttagaagagtatcaaatcaatgagtaatattaacctatttcccgtgcgaatctattgaaaaagatcacgttgtccgcgtggtcttttttcatgcattcaagcattgaaaacagttctcaattagcatagaattaagagcgtataataattgctagaatgcgattcttggagggtcatctatgtctaaattagagattatcgatttgcacgtcggcatcgacggtaaggaaattttaaaaggtgttaacctggaaatgaacacgggtgaaattcacgcgatcatgggacctaacgggactgggaagtcgacgctttcggaaacgattatgggcaatcccaagtatgaggtactacaaggtcagatcaaactagatggccaaaatattttagaaatgccggttgatgaacgcgcccgtgcggggttatttttggcgatgcaatatcctgctgaaattcaaggggtaacgaacgctgaattcatgcgtgcggcgattaatgcacgtcgggctgaagatgatcagatttcagtgatggctttcttgaaaaaattagatcaacggatggcattcttggatatgacggaagaaatgtcagaacgttacttaaacgaaggattttctgggggtgaaaagaaacggaatgaaattctgcaattgatgatgattgaacccaaattcgccatcctagacgaaattgattccggacttgatattgatgccttgcaagtcgtttcaaaaggcgtgaacgaaatgcgcggggctgattttggctcattaatcatcacacattatcaacggctcttaaactacatcgtgccagattatgtgcacatcatgatgggtggcaaaatcgtcacgactggtgatgcgtcacttgcaaaacgtttggaagacgaaggttatgtcgggattcgtgacgaattaggcttggatatcaaactgactgacgacgaaagtaaatagggggcgattctgatgaagaaaacattagccatcacgcctgaacaaatcgcgtcattctcacaattgcatcaagaaccggcctggtttgctgaaatgcgtcaagcagcgtttgcgcaaattgagcaactcgaactgcctatctttgaaaaaattaactataaacattggccagtgatggcagcaaatgcgccaacagccgttaaatccgatttgagtttaatgccatctgtggcagcgaatctttcagctgatcaaccgtacgcagtacagattggtcagacaactgccaagttaaatttaccggcagaattggcagaacaaggtgtcatttttaccgacattttcaccgcgttacaagaacatcctgatttggtacaacaatactacatgcaagtcacagtgaaaccgaacgaggatcgcttaacggcttttcatacagctttgatgaacagtgggctcttcttgtatgtgccgaaaaatgtggtgattaagcaacccattacggcttattatgtacaggacagcactcaacccgctgattttattcatcacgtcctcgtagtagccgaacaaaacagtgaatttagttatcttgaaaatctccaaacagcgggtgaccacaagaacttagcaaatgttgtcgtggaagtgattgctaaagataacagtcacgttcatttttcagcggttgatgcctttggaaaatccgtgacgacttacttgaatcgccggggccacttgatgcgcgatgcgcggattgattgggcattgggatcaatgaatgatggcaatatcatcggtgactttgattctgatttagtgggtgctggatcacatgctgaaacgaaagtggtcgccatctcaactggtaaacagattcaagggattgatacgcgtgtgacgaatattgggccgcgttcaattgggcacatcttgcaacatggcgtcattttagaagatgcgacgttaacgtttaacgggatcgggcatattttaaaaggggctaagggtgccgatgcccaacaagaaaatcgcgtcttgatgttatcgcggacagcacgcggggatgcgaacccactcttattaattgatgaaaatgacgtgcaagctggccatgctgccagtgtcgggcgcgttgatgaacaacaaatgtattatttaatgagtcgcggtctttcaaaagaagtcgcgcaacgacttgtaattcgtggtttcttaggcgctgttctaagtgaaattccggataaaaacgtgcgccaacaattaacggacacgattgaaaggaagttaatcgatggtcaaccagttaaatgattatcggtgcgactttccgattttagaccaaatcgtcaatgatgaaccacttgtttatttagacaatgcggcgaccacccaaaaaccacaagccgtgattgaccggttggtggcttattaccaaaatgacaatgcgaacgtgcatcgtggtgtgcatactttagctgaacgagcaaccgcccagtatgaagccgcgcgcacgaaggtccaaaccttcatccatgccgctgcgagtgccgaagtgattttcacaaaagggacgacgcaaagtttgaactgggttgcaggcagtttcggcccaaccgtggttgaagccggcgatgaaatcgtgattagtgtgatggaacatcatagtaatctcgtgccgtggcaacaactggcgcagaaaacgggcgcgaaattgcgttacatcgacttattaccggatgggcaaatcgatttagagtcagcacgccaggtgattgggcctaagacgaaaattgttagtttggcgcatgcttccaacgtacttggggttgtcaatccgattaaaacaattgcggctttagtccatacacaaggcggttacatggtggtcgatggtgcacaagccgtgccgcacatgatggttgatgtgcaggcacttgatgcggacttttacgccttttcagggcataagatgcttggaccaaccggcattggtgtgctttatggcaagcaagcattacttgaacagatgccacccgtggaatacggcggcgagatgatcgactttgtgggcttacaatcttcaacgtttaaagaattaccgtggcgtcttgaaggtggaacgccaaacattgcgggggcaattggcttaggggccgccattgattatttaacgcaaattgggatggatcatatccaagcccatgaacaagcgctagtcacaatggctttaccgcagctccaagcaatcgacggcctcacgatttatggcccacaagatgccgcccaacgcaccggtgtgattgcctttaatctcgacaatttacatccacatgatttagcgaccgccctcgatatggaaggcgttgccgtacgtgctggtcatcactgcgcacaaccgttgatgcaatggttgaacgttgccgcaaccgcgcgcgctagtttttacctctacaataccgaagcggacgtgaaaacgttcgtgaccgccattcaagcagcaaaggagtttttccaaaatggcactctctaaattagataacttatatcggcaggtcattcttgaccattcgcaacatccgcatcatcatggtcacttgacgactgccgatcatgaaattgaattacgcaaccccacctgtggcgatgtgttacaacttgaactggtgctcgaagacgggcagattagtcagattgctttttcaggggaaggctgtacgattagccaggcttctgccagcatgatgaccgatgccgtgatgcataagacaccggcgcaagcggaggcgatgatcgaacgcttttcggatatgatgattggtgatcgtgacgaagactggtcattgttagaagatgccgcgattttacaaggggtgcaacaattccctgcgcggattaaatgcgcgactttagcttggaaggcgctccacaaagccttaaatagcgatgaccgacgtgcaacaaccggtcaaatgatgaaccacgcagaaacggaggaaactaacgaatgacagaagagacaacgatgccccaatttgaagagtacgactacggctttagcgacgatgtagagcccgtcttttcaactgggcgcggtttaacggaagacgttgtgcgcgccatctcgcgtgagaaaaaggaaccacaatggatgttagatttccgcttaaaatcatttcacgcttatgaaaaaatgccaatgccagatttcggaccggacttatccgatcttgatttagaacacatgttgtattatcaaaaggcaacggacaagcaataccgcgattgggaagatgttcccgacaaaatcaaagaaacgtttgatcgcttaggtgtgcctgaagccgaacgtaagtatttagcaggttccagtgcgcaatatgaatcagaagtggtttatcacaacatgcgtgaagaattcgaaaaacttgggatcatttttaccgatatggataccggtttacgcgaataccctgaaattgtgaaggaatacttcagtacgttggtcaaaccaactgataataaattctcagcgcttaactcggccgtttggtcaggtggcacgttcatctacgttccaaaaggcgtgcggacggatattccaatccaatcgtacttccggattaacgccgaaaattcaggtcaattcgaacggacattgattattgtcgatgaaggcgccagcgtgaactacgttgaaggctgtactgcaccaagctattcaagtgatagcttgcacgcagcggtcgttgaagtctttgtgaaacgggatggctattgccgctatacgaccattcaaaactggtcaaagaacgtttatagtttggaaactaaacgggcccaagccatggaaaatgcgacaatggaatgggtcgacgggaatctcggttcgaagatgaccatgaaatacccaagtgtctacctcgatggtgaaggtgcccgcggaaccatgctctcaatcgccgtcgccggcgaaggcgttgatcaagacagtggcgcgcggatgattcacgccgcaccgaatacgtcatcctcaatcgtttcaaaatcgattgccaaagatggcggggccgttgattaccgcgggactgttcgttttgaacgcgacagtgacggttcgtttgcccatgtcgaatgtgatacgattattatggatgaccgctccagctctgatacgattccgtacaacacaattctaaacggcaacgtttcaatggaacatgaagccaaagtctctaaaatttctgaagaacaactctattatctgatgagccgtggcatctcggaagccaaagcaaccgaaatgatcatcatgggcttcgtcgaaccattcaccaaggaactcccaatggaatacgcggtggaattgaatcgattgattagttatgaaatggaaggcagtgtggggtaattgaattgcataagctagaaatgcctatttgaaggcgtttctggctttttttgtttgtgcatgtagaaagtaacaccaaaagtaacaccatttggatagaaatttttagagagatttaactagtatgcagtattaaatggtatgataaaataaaaattataggaggtatggattgaagtcaatatttgagacagattttaagagacattcagaaccgcgtttaccttccacagctcaaataaatcattaatcgcgattaataacttatttgaaccctggaaagcattaaatcaggcggccatttggctcgtaagtgttgcaatttcaacttgtaagggggtctggtagcccagtgaactatgaattctcttcctattgtagaaagcatgcacatattcaaaaaggacggcagcggcagtttcataatggatgtaagccaagccgtaaacgcccaccaagtgaacatcaatcaattttgtgccacgtatcttaatcgactagcggccggattggcccaagcggacgaggcgattggtgctcattattgcaactggtcggcgattattggccgacgtttgcaaaatgggcttgtcattacacagcttttagcggatggcacgttaattctgagcaatggctcgcaagtggcagtcggccaaaagattgattttaaggaggagctgatttaaatgacactatcggttgccagaaaagttagcttagtcgggatgtgcttggcgttattaatggttagcgctcaagtcagtctaccgatttcgctggttccagtaacactccaaacgctcgcagttggtgtaattggcaccacgttaccatggcgcttaagtcgactggtcatcgggagctatctcatgctaggcatgcttggcttaccggtctttgcaaattatgccagtggggctgcagtgctggtcggaccaacaggcggctatctgattggttttatcgcttatgtggcaattgttcactatagtcagcaactatttggacaatcgaaccgcgtacttctcggcggcaatgtgctagcaagcattattcaactcggatttggcacactctggctaatctggtcattaaaattatccgtagtgaccggcttaatgaccggttttgtgccgtattttccgattgaaatgatcaagagttgtttagtggtgatgattgccagtcgcgttcaatcaattagttaaaaaaacactatccaatcggatagtgttttttagtttaacgctttaattttagcgattaacgcgttatttttaaggtatttggcaaaaactaacgcggtttcgcgatcttctgcatagtctcgaccgctttgttggcgtgcccgagcacggaggtaatacaaatgatcgacttgtttgatgatttgatttttttgactcagtttgagggctttcgtcaaaaactcgatagctgcatcaatgcggtgttggttaatcatataggctgctgtgtgacgcgaagcaaataggacgcgttgaacatcaatgacattgatgtgatcaagttggttgatgaaattgatattgttattgaaataaaaatcagctaattcctcgccagcttcttggtaaattaaacccatgccggtatttagaagtaacttcaacgttgaagtgtcgtcaccgatagccgctgtgaacgagttataagcggaaaaaatctgtaattcagattgatggtcaaggtaacttaaatagccattgaaaaagaagaagacggcgggataaggatgttcggttgccttgaagtcgatatcggtaattaatgcggcagcagggccagaatcgcctgctaataaagcaacttccgcagaaatcacgccttcgtcactggcagtgtcgagcgcgttaaattcggtgaaaagttcatttaatgtcaatccaagccgtgtacaaatcttaattagaattgggattgtggggggtagatttttcttttcaattttgctgattgtattttgcgtgcaaatccccgctgctaattcagactgtgtcagttgcttgttgagtcgctgttgatggatcaattggcctaaaaacatttttagcctccaaatagtaattatttatctatatttatgattaattatatacgtttaatgcagacaagtatacgtttatgatatttaatccttttaaaaaaattacgtgataaaatcgaaatgagtcaccaatcatgggtattcataatatgaaaggaggggtatgataatgatgagtaacattcaaaatttaattttctggttttggaattaaggttcgagtagggagttttatgcatggcaatgaaaatgccgctggcaatgcagattgtcattaatctaagtacgtttagttcgtttctactattagtattatttttgacggggaagttgaaacgaacgaacagatttcaactactattatcagttggagtcggcattgcttttgttcagggaatggatttattaattggaaattttcttgaagagctatggctgattttggcaactgttggattatatggttggttaaatggctttaaaaatctgcgtaaattaaagacaagttatgcgttaattatcgcaaccatctttagttacatcatcgtgatgctatcatcggttctaacaacggtggggttaattgggtatactcacttaaagggccttgataatctgatgagtagccagtttaattggcaaatggtgtgtttaattatgttgagtcaattattgattgcagccggattaggattaattgtccaacggttagatcagcttattaaagcatccattgcttcatacggtatgtgcgtggccggcacgattttagccggtctcgcgttatttgtggtggcagtgatggtgctttttgatagctttaagcatgcgaatctgccggttgaatatttgtaccttgtgttaggacttgtgctattactattagttttggtgattgtgggaatgcttttgtatacgaaagctgtgattcgccaaaatagaatcaacgtagaacaagaaagtcagcgaaatctaacgctgtatgttgaacagttagagcgtaactaccgtgaaatacgcaagtttcgccacgatatcgccaatgctttattggctttagagacaattatcaatgaacaagggagcccagttttaatgcaggattttcatgatttactaacgcattataactttgacacgattcaagatcaggcaattggacggtttcaagagattaataatgcttatattaaaggcattatttttagcaagtatattgaagcacataataatcggattccctttaatttagaggttcaaccggatttatttaagcaacaacaacagtattttgatgaattacggattctgggaatctttttggataatgcaattgacgcggtaaatgatattaaagatggttcaatcagtgtcagtttattcgagcaaaagggtaagatggtctattgtgtcaaaaatatgattaatacaccagtagaatttggtcagctttatcaggctggttattcaacgaaggggattaatcgcgggcttgggctcacaactgctaaagaaatcacggatatgcgctcagattttagcttaatgttaaaacaagatggagactatttcgttgcaatgcttgttgttgaacaggaggagacccatggttgatatttttttatgtgatgataaacaggttttactagatagttatgaagagattataacggcatatattcaacaaaatacattggatgctcaggtgcgtttgaagactaagaatggctatgacctattaatttttttacaagaaagtcaaacgcaagggggcgtttactttcttgatattgatttagagaatgacgtgctagatgggatggaattggcgcttaaaattcgtgaattggatccatatgcacagattgcgttcgtttcaacgcatgacgaacttttaatggaaaccattcaacgccgaattaatgttttgaattttattttgaaggatcgcgggttggcgcaggttcgcgcagatattcaagcaaccattaacgatgccattaagttacgacaacaacaggtgccgttagctgaagaaccagcttattttgaatatgatgatggattatcgtttgaaaaagtggcaattcaagagattaattatttcgaaacagcgcataaagcacggcacgtcttcttacacagtgatcatcggttaagtgaatttgtagggaaaatcgtgacgattcaagcgcaattgccacaatttttcagagcccataagagtatcctagtgaatccggacaaagtcgtacggattgataaggagacacatcaagtgatatttgcaaatggcgatacatgcgatgtctcgtaccgtcgaattgaggcattacttaaattgatacaagcagacaagtattaaaaattaagcaacgccaaaaattcgctttcaaacgtggtacactaaaattgataatggatgacagttttaggaggctacggattgaaactatatacaaagaccggtgacaagggattaaccagaattatcggcggtcaaaaagtgcgcaaaaacgcaattcgtgtggaagcatacgggggtgttgatgagttaaattcatacttaggtgtcgtcatcagtgatttacctgattatccggcattgagaatggaattggttgagattcaacaaattctgtttgactgtgggacagatttagcgacgccggatgattcgcgggggtatcggacagacaacgcatacacgaaatggttagaagctaagattgatcagtatgcagatgttccacctgctttaaaagaatttattttacctgggggagtaccatcagcagcgaaactacaatattgtcggacaattgcgcggcgtgttgaacgccaagtcgtcgccttgcaggaagtagaaccgattaacgaagctgtattaactttcttgaatcggctctctgattatttatacgcgattgcgcggtacgtcaatcatgaagagggcgaaccagagacagtttatcgaagaaataaaacaatttttcattaaaaaaaccgccgatgtgcggtttttttaatgtcgaaattaagggatgttttgaattgctaacgcagcaagcttccactataatagcttgaaaagaggaagtgattgtgatgtttaaatcaaaagaagctaaagtcgaggcttacgaaatgctcttaaaacaacaagctgctttgctggcaggtgaaacgaatttaattgctaatctagcaaattcttcggcgttattaaatcaaatattaccggagactgtttttgcgggttattatctgtatcaagatgctgagctgattttaggcccatttcaaggaaacgtctcgtgtatgcacattgcactaggtaaaggggtgtgtggtgaagccgccgcaaagcacacaacgttaattgtagaagacacggcgcaacatcagaattatatcgcttgtgattcggctgcacgttctgagattgttgtgccaatgatcaaggctaatcaactaatcggtgttttggatcttgataaccgcgtcgttggcgcttacgatgaggtcgaccgagattatctagaacagtatgtcacgttactgatgcaaaactaaaaaaagcaaatgcgtttctaattgatgttagaagcacacttgcttttttttaattgattagagtgtcttgattttttgtttgaggtggacgcaaacctgtgtcaccacaatgattgccaagagccggtccagataatccgtaccggcttgaaccagtgtaatgctgacaaactgatttagtcccaagccgcttagtagttgtacaattaaacttgaccctgaagaggtgataccgtggaacaagaagtaagtaattaatgaactgacaattgtgccgggaatggcgacacctaaagcaacaaggggtaactcgcgtttcgtccgttggtggtggtataagaaccatccagcgagtaagccggttaatagaccgtctggcaagtaataaagcgcaaataagtcggtcgtgacaccgctgatgatgctactgcaagtggcagttaatgcgcctgccagaggacctaatagggtgctggctaaaatggtgccgacgctatcgagatagattggtaaccgtaaaaatagggcaatgttagcgcctacgtaattgagtgcaatggcaagtgccagaatggttaagtgttgtgttttaaattttcgcataataggttccttatctaagttttggtaagtccgttttaatgagggttgcttgtgcatttaaaacgacggtcaaaaactgttcaaagaaacgattggtgtccaccttagttaagatgaggctattggcaggacggtgccagaaatcgaaccggtcaaccagtgtttggccaatgctgatgccggttgtttcgacggtggtataactttcaaagccgtgacaaagggttggatcgataaaataggcgactgctaatggatcattgatcacacagccgataatgtgttcatattgccaatgaaaatcaaaataaaactgggtgatggcttttagatagtcgccgacttcaggattgacacgctgacaataagccagcaatgttggcgtgaagacaatttcgcgggtcacgtctaagccaaccatttcaatcttttgatcgagttggtcgaataccaacagtgcggcatccggatcgctccagtagttgaattcagcaacgggtgagcagttaccgtgactcttataggtcccacccattgaaacaaagcgggcacagtgccgacctaaatctggattccgctggagcgcagtcacaatattggtcaatggtccgagtgcgataatactgatatcgctcggttgactaaaagtggctgctaaaaaatcagcggcggattgttgtgccggttgaatagtggataggcgcgggatatggctgtcacctaaaccatccatgccatgcgtatcctgcgcactgacaaatggtttatggagcggtttatccgcaccaacataaacgggaatgtcgagccgcccgaggcgttcaagacacttaaaggcattgtccacgccgatttggacgggaacgttgccgcaaacaatggtgattgcaacgacttccaccgctggcgattgaatggccaaattcaaagcgagcgtgtcatcgatgcctggatcgcaatcgataatgattttgcgagtttgcatttatttctaacctccttgagatccttagttttttattctgggaagtttccgaaccagtccaagtagttttacttgattttaaatgcacccctttatgataccgagttggtgggcgggtgtaaatagcagttatttttaaaaaacaggcttgacagtgattagcgaacttgatattataataaacgttgtaagatttgatatggagaattacccaagtctggctgaagggaacggtcttgaaaaccgtcaggtgggttctgcccacgcgagagttcgaatctctcattctccttaaagtaaaaagcggttcgcggatgcgagtcgctttttttgttgggtaaaataaaaaaccagagtgcatgcgcactctggtcgattcggtttaaaattagtttgtgtaggtttggaaacgacttgcatcggtattgtagtctttagcatcggctggattttcgattgaaccaaatggcatttgcgcacgaagtttccagtttgatggaatgttccattttgcagtaacggcttcatcaattactgggttataatgttgcaagctagcgcccacatttttttctgccagggctaaccaagtggcatattgtgccatgcctgaagcttgttctgaccatgttgggaagttttcggcatataatggcacgttttcttgaagattcttaacaacgtcttgatcttcaaagaacaagattgtcccgacaccagcggcgaatgaagccaatttagcttgtgtacttgggaagttttccgcaggtgttaatggttttaaggcagttgctgtaatatcgttccaaagtgtttcatttgcttttccaaagagaataatggcgcgtgaaccttgggcgttaaaagcagttggtgtttctttaatggtgttgaagattaattctgataattcagcttcgctcattgaaacgtttttgccaagtgcataaattgtccggcgtgtttgttgtaaatcgaataattctgtcatgttcattactcccttgtgaaatcgtttttatcagtgcatgcgaataatatagcatacttattaaatgtaagcaatgaaaaaagcgaaatccctcgtttgtatttcgcaattaacagcatttagttcgattgtattttacaattatagactagactgcagtttaacgggcaattcagattttgaaacgacagtccaagaattgacgaagcgccccttggcatctaattttaagtagtgattaggttttagtgcgcgcggcgcttggaaaacgacttcgtaatgactgccatcagcacggtaagcaggttgccggtaaaggtaatcgccatgtgcttgttgtgtcccgtattggtgtgctgttttaacatagacggcttctctgggaattaagaggttgaaccggtcccactgttgggcaaggtcattgccgtccgtcatattctgagttgtggctgatccgataattggaccgccgataacaattagtccaagtgagaacagtaatagaatgatttttttcatgattgacactccttgtgaattgttgtcttaatcgtatcaagctagaagttacattgattcagtctaaaggtggaatttattctaagcgaggtgacgattttgtcatatcgtgggcctgtttaaggattgatagtttatgtctgtggccgaatgcattataatagttagttatgagatgttttcagtagagagtgggtgatgattgatgaaggaagttcaaaatgtgatgcaacagttagacgcgattcgtagtgcattgattgaaggggacatctatcaatcaattccggaaaaagtattggtcgtcatggatggcgtccaatataagacgcggcggacacatgtcgtagtacctgaggacaacgagtcagtcttgcaacgaatcacagcaattgatgagcgaattaaaaccaaaggcaaagaagcgaccatcagcgatgaagagctcgatgatttattaaggcatcttgcaagcccagattcgcaagtgcgcgataaaggtgttttttacttattcaatcgattattacggcagacggttttaaccccagcccaattgatttgggtcaaggaccgcttattgcaagatgattatttattcgcgcatattttagaacctgaaaatgacgctgtttttttacgttcgtttagcgcgatgtttttggccgggattttatatgctaaccgcactttttatcatgtattaagtacggccgaattattggcaattgaacggcgagtaatggcttatacagtcatcgaattagattcacgaggatacgttgatggtaaaggctgggcgcatgcgatgacgcatatcatcaatgtctggtcagaacttaacgaaacacctgaaatccaacgtgcggataagattttgatgatggcaattgtgctacaggcgtatcgcttctctgataacgcactcgcatatggtgaagatagtcatctgacgaacgttctaatcagtttaatgaacaagcatcaactctatgtcgattattgtttaatcgtcttacaggagtggcagcgttcattgttgactatggcaccacaggataccgttggtttttggaatcggtggtataaccgcaatcgctttttacagtcattgttgctacaacctgaattacctgataaaattgcggattacttacggaagatttcagatttattttaattaaccagataggattgagagaagatgacagtaaaagggattatttttgacgtcgatggcgttttagtggatagtgaaccgtactattttgaacaacgcttagcatttttgaatgcaattggcgcacgactaacggcagaggaaagtcgtaaacaaattggttccaatatgaatgccgttttaaaacagttgtttccaaaccatactgttttggaacgagcggcaattaaaaacggctatacgtcgtataaagcggctcatccaatcgtttttaaaaatatcatgaacccagacgcgcaaccgttattagcaaccgttgcaccgacatatcaaatcggtttggcgtccgctggtgagcgcggaattattcaacaaatgttgttggaaaccgcgttagaaccttattttgaaacggttgttagtggtgcagagattgcgcataataaaccagcaccagatgtgtatctagaagcgcttaaaagaatgcatttagaaccaaccgaggcggttgcgattgaagactctgcactggggattcaagcggggaaggcggctggtttaaccgtcatcgcattaaaaccatttgatccacttttcgcgattgatcaatcggcagcggattatcaaattgaatcattaaaagaagttccggcaatattagcaacgttataaaaaacggcttccgctgcaggaagccgtttttttgtcgtactatcgaacagcaccttaacaattaattaaagataaatgtttggtaatgtttagtatgtagtgtaaaatacttattggataaaaaaataagtaatgccacataactagttcatagtgtataatgaacgcaactagtagcgtcattgctaattgatgtaaattacttaattgggttatattttccggaaattaattttaaattaaataatgatgtaattggagtatttaaaatgagaatattaggggataaactaaaacaaatccgtaaagcacgggggatgtctcaagcggagttagctaaggggatttgtacgcaagcaacaattagcttaattgagaaaaaagaacaggtgccaagcacaaagattctcttggaaatttgtaagcggcttgaaattacgttggactcagtgattgtgcaagaagatgatcaattacacgtcttgttgagtcgtgtgcaagcattgttatttaccaatgaattcaaaaaagcacgtgatttgattcagcagatctacacagatcaactggtcaaagcagatgattacaaacggtattattatttccaaggtcaaattaagttattgctggagaataaaccggacgatgcacttttctttttcaatcgtgccttcaatcaatacgttgtttctcagacggatgtttacggtattctatgtattatcggcattagcaagtcctatttgatgaagggcgctttagagcgtgtacggatttatgcagaacaagccgttgaaatgttggagaattctgatccacttgctatggccgatttccaagttgagttgcagatttataatcacttagcgggaattctttttgaattgaaggagtatgaaggtgcgattaagtacgctcagcttgcgattgacgaagcaatcgataagcaaagtctttacttacttgatgcattgtatttcattcttggtcgtgcagaacatgcgcttcatcgagagaacgccttacaggatttaacggttgctaaaacattggcgttaatccggcatcatccagagattattgtgcaagttgatcaacaattggctgaataagtggttaaccactaaaaaaagccgggacataagcgtcccggctttttgattgctaatttatgattcttcgtgaccaatgctactgcgtttcttgttgagtgcgtgtttattatctaaatctgtccgcacaacgagcacgtcgcaaacggcggtccgagtaacgtattccgttacagaaccaatcaagagacgttcaacagcgtttaaaccagttgcaccaatcatgatgagatcgatatttttcttttcgggtacttcgcgggcaattaaactctttggtgcgccatattcaatgctatagtcaacatcttttaagccaagttcattggcagtcacgatgtattcgtccattgttttcttagctgtttctgtgacttgttcaaccattgcggaatcaaaactagagatattttggaaggcgcgggtatcgataacgtgaatcaagtggagttgtccgttattccgaagggcaacttcaactgctttacggaaagcgagttcagcttcataagaaccatcgattgcgaccaaaatgtgcttgtattgttgtaacattgtcatcacctcatttaattttacatctttattatacgctagttcagtgccaaaagtaaatcttaaaggttagttgcaaagctaaggccgactaagccggcgattaaactggcagcaacgagcgtcaccaatgtccagactagtggcaatagccagtaaatcaaagccccgcagatcgctacaccgatgagtgcaatccctgaaaagtacatcaatcgacctaaatgccggttttcagttaaatcaaagagtaggaacttcttgtcttggtagtaacataaaatcgcaccaattagggcgataatgattaaaaaaacgattatggcgatttgaatcaatgtgcaacctcctaaaataatcaacaaaaaagggccaacgtaaacgttagcccggtcaaagtcgttggactttgggaaatctagtggtgccgtagatgcttcccgatagttgagcccgctagaaaatgcaggtgggtcagattattattagacttggttccttcgcgaaaaagtctacactcgctaataactcatccgtcccattaacgaattacttgatcggtcaacataaggtgggaagacgcgcacaccttagaaatcctactattatagtagcacgctcgtgatgttaacacaacacttttgtaaccgttcacttatgcggactggcttggcgcaagcgttctagctgttgtttgaggacttgctcgtatttaccagttgcttttgcttcgtaataatgactacctaagagcttatctggtaggtaatcttgcgcgacccagtcgttgggataattatgaggatatttgtagtcgacaccgtggccaagtttttcagcccctgcataatgggcatcacggagatgatcggggacttcaccggctttgccagcgcgaatatcagctaacgcgttatcaattgcggtgatggccgaatttgattttggagataagcagagatcaatcactgctacggccagtggaatccgggcttcgggaaaaccaagttgtttagccgcagcaattgcctcgactgtacgggcacaggcttgagggttggcgaggccgatatcttcgtaggccattgtcatcaagcgccgactaatcgacattaaatcaccggcttcaatcaaacggcccatataatggagcgcagcatcaacgtcactgccacggactgatttttgaaaggcggagatgacatcgtaatgggcatcgccatctttatcatgagtaatggcttttttctgcacgcattcttcaataacgtcaatatcgatgtcgatgacgttggtgtctggattcgctggtgttgaacgagcagcgagttcgagggcgtttaaagcactccgtaaatcaccgtttgtgacgcgggcaaggtattgttcagccgtttcatcgagattgatggctagtgcacctaagcctttttctttatctgtcagtgcccgttgaatggcgacatgaatgtcggcttcagtgaggggcttgacttcaaaaatttgggcccgactccgaatggcagggttgatactgatatatggattttcggtagttgcaccaattaagataatgcggccactttctagatgtggtaagagaaaatcctgtttggttttatccaagcggtgaatttcatcgaggagtaaaatcacggtgccactcattttagcttcttcagcgacaatctgtaaatcttttttactatcagtggcagcattcagcatgcgaaaagcgtactgggtactaccggcgatggcactagcgatactcgttttaccagtaccaggcggtccgtagagaatcattgatgagaggagtttggcatcaaccattcggcgaatgattttttgcggccccactaagtgcgtctgaccgacaacttcatcgatgttagtcggacgcatgcgaaatgcgagaggttgttgcatagcgttcatcctttaatgtttaggttgttcctagtataacatgtcgcgcaaattcgtagtgattatcgttttaaaaggttttagggatgtgtataatgagttgtataagactgaattaagaagaggtttcaaaatgcctaatcaattatttgagaacattaaacaattacgcttaacacctttattgaaccaaggtgcttttggggtcgaaaaagaggggcagcgagtgaccggattgggcgcattgagtcaacaaccgcaccccagtgagttaggatcgcgaacgtttcatccatacattgcgactgattttgcagagatgcaaacggaactggttacggataccttcgaacagaccgtagatgtccaacaacaattattagcgctcgaacaagtattgcaatcaagtatggccgattcggaatatatttggcccctcagcatgccaccgttgttaccagacgatgaattaaccattccaatttcagaatacacaccggcggtaaaagcctatcgtgactatttgacgaagcgctacggtcgacgtctacagatggtctctggcatccattataattttagcctgtcatcgacgttaattgtgcgtttatttgatgaatactatcatgatcactatgtgagtctaaaagattttagcgatgcgttgtacatccagattgcgcaaaattacgtgcgttatcactatgttttaacgtatttatttggtgcgagtccgatagcggaaccaggctttttagaagatatgacgaaattaccagaacaccctgtacggagtttacgctcgagtgaattattcggctacagcaataagcaattattaattcattttgattcagttgccgcatatgttgattcaatgcgccaagcgattgctaatggcgacttaatttcggaacgcgaattttacggaactgtgcggttacggagtcactcattggatcagatgttagagactggtgtggattatttagaatttcgggggtttgatattaacccgtatactgcgacggggattgatcaacaacagctagacttcttacacttattctttatgtacttattatccttgccgaaattatccggtgatttagccactcagattcagacgggtcgtcagttaaatgacacagtagcattagagaatccgctgcagccatcgcagctccaaacacaattggaaactgtgatggccgatttggcccaattcattacggattatcatctgaatgagcgttttaaacaagcttggacagtgatgaatgagcgtgttcaggaccatcgacaaaccttgagttatcgcttaacacaagcgattgaagaggactcgctaaaggcatttgccctcaaacaggcaaaacgttttaaatgtgagctgacagagactccctatcagttacagggatacacggatatggaattatcaacacaaatgctgatgtttgacgctttccaaaaagggctgcatgtggctgttttggatcgcgatgaacaatttattgagctgacctatcaacatcatcatgaattagtcaaaaatgggaatataacgagtttagatcagctaattagtgggccgttagtggataataaggtagtgactaaaattttattggcaagtcatggtatgcgggtgccagcgggtgccgaatataccgctttagagacggcagtagcagattatcaagcggcgtttggtcagcgcgcgattgtcattaaaccaaaacacagtaacatgggggcgggcattaccacatttttaacgcgtccaagtgaagcggacttcattgctgcttttaaactggcacaaacgtacgatcagcaaattttagttgaagaattcattgcgggttcggaataccgtttcttagtgatgaatcataaggtccaggctgttttagaacggattccagccaatgtcgtgggggatggtcgttcaacaatcgcccaacttgttgctaagaaaaacgacaacccattacgtggcgaagcgcacctgacaccgttgcaaaacattcgccttggtgaacgggaattgctcatgttgaaacaacaaggttaccgccctgaagatgtgccattgcgtggttcacaggtcttcttactacaaaattccaacgtctcaaatggtggtgattcggttgacgtgaccgatgagatggatcaaagttactttgcgattgctgaacaggttgctgaaattttgaacctcaatatcacgggaatcgatatcattgtgccaaacttataccaaccatatgatccggaacaccctgagatggcggttgtgctagaagcaaactacaatccagcgatgttgatgcacttgttcccaatgatgggtcaagcgcggcgcgtttcaatgactgtcttacaattacttttcccagaattagcgattgaaaccgactaaagtaatgcaaaaaggcccgcacaagttaaactgtgcgggcctttttagtgttaatcgaaaagatgttttaagaaaccaccttttttggtgggtgcatcttgcgttgtggtttttggatcagggtatagtgtatcgagcgtaattgcctcatggttaatcgcgtctttggcaaccactaacaaaccgaaggccgttggttcggttttggctgtttcgttgttaacgagcgtgaacggaatcccgtgtgctgaaagggccgctaaataatcggtagcagcggggttcttgccgtttaataagacggaatagggcttataatccgtaagatgcgcttcgaatttagcttgcgcagtggcgagttcctggttagtaatgcctaagaagacgcgttcacgtaatgagccgaggtagcggcggcgttcatcgggattggtttgtggtgcgccgtgcatggcactatccaagtgttgttgtaattgatcattatctgacaaaatagtcgcctcatttctgaattgtgctatattagaattaaacctaagtataccatgttggaggaaaaagatgtttacacgtgctgattttgatatttttgatgaccaaaccttaaagggccggttagacaagatttatacgcaacttgatccaaagtttgaagtatttggtgtgcaattgcaagcagaactcgtagtagaaacaaaacgcgaattctcgttgcatattgccaagcatttacgccgcttcaaaaatccaccaatgaatacttggatggcacttagtgagagctcacgtgggtataagatgatgccgcactttgaagtcggtttttgggatgatcggatcttcgtttggtttgctttaatggctgagatgccagataagacggattacgcaccgttattggcaagccaaacagaaagcctcttaagggactttgccgactatgatttaagctacgatcacatgaccaagcaaaaattcccaatgtcatcggagaacttgaaactgattcaagataagtttgctaagaccaaaaaaggggagtggctcctcggaaaagtttatctgaaagacaacccattattcgaccaacccgaagctctcatggccgatattcaaacgaccttgatgaagatggtgcctttatatgagttggtacagactaaatagattaaatcagacgcgtgtgctaagtaggcacgcgtctttaaatgcgcaaaaaaagagccagacctaagtctgactcttttaattgaacagataactgcttatctgttgtagaattcaacgattaaggcttcgtcgatttctggttctaattctgaacgttctggtaaacgaacaagtgaacctttcattgtgtcagcatcaaagctaacgaatgaagggcgaccaactgtgccttcgattgcatccttaacgattacaaggttcttagatttttcacggattgaaatttcttgaccaggttttacttcgtatgaaggaatatcaacacgtttgccatcgacagttacgtgaccatggtttactaattgacgagcttgtgcacgagtgcttgctaaacctaaacgataaacaatgttgtctaaacgttgttctagcaagatcatcaagttaacaccatgcttgccttcgcggattttaccagcgcgagcaaataagttccggaattggcgttctgttaaaccatacattaaacgaagtttttgtttttcgctcaattgcataccatattctgaaatcttaccgcgacggtcgttaccgtgttggcctggagcgtaagggcgacgagcaagttctttacctgtgcctgatagtgaaattcctaaacgacgtgaaagtttccactttggacctgtataacgtgacataaaaaaatcctccaataaatgttttggagtaaaataatccgatgtaaacttagtaatcgttcagttcacttattaacaatcttcacctttgcagccgcaaggttacacaattgaaccaaaactctgggcaaatgaactgttgacggctttaccgtttactgctgcattattttacacaatggctagtatagcgtacggtgtgcggcaacgtcaagcaaattcagattaaaattgcagtttttctaaagtttatcgctaattattgctgaaccgttatcttattcatgctataatcaaacatagtttaatgaattgaagtggatgaacggactaacaaatctgatttaaattgtaaaagggtgtgtctttgaatgttttacattctcattggaatcgtagtcgtcgcactgattggctacctaagtgttgttttttatcaacgttattttatcaaacaaattaaacaactagaagcacataaaggcgacttaatggcgttgccgattccggaacgcttaacgaagttacggtcgttacatttgacgggcgaaagtttgcaaaactttgatcgttgggaaaaacaatatgagcagattaccaaccataacttcagcacgattgaaggctatctttttgatgcggaaacggccaatgccaaataccaattcattcaggttgcacggattctcaaacaattgcgggcgtacttgactgaaacggatcaagatttactggatgttcaagatgctttagaaaatctacttgccaatgaagccgatacacgtcaaaaaattcagcatctacgagaacaatatcaacaactacgtaaacgtttgttgactaagagtttttcgtttggacctgcattagatgcgcttgaagcaacgctaggtcgcttagaggtggattttgacgaagccaacgaactaacaacagccggcgaccatctaggggctaaggccattttgcagaaattaattactgaaacaacgcaattagaagatcagatggaacggattccaaagcgctataacgaattagctaacgagtttcccgaacaactggttgaaattaatgatacctaccatcaaatgttaaaagaatattatcaatttgatgatcggcagattgaagtcaaacaacaacaactaatggatcaacttgataagagcactaccttgttaagtgatttggccattgagtcggttgaagccaataacgatgaaattgcacgtggcattgatcaattatatgatcaattagaagctgagatgactgccaagaaggcagtcgcgacgcaattgccaaccaccgcgacattcgtgcaacatgctgaacgtcagaaccatgagctattattggaactcgatcatctcaatcagagttatgcactcacacatgatgagttggcaagcgccaaacaattacaaaagcaaattggtgaagaacaggcgttagttgaagggcaccaagcgaagattgccaaccacgaagcggtttacacggcgattgctgaagatttgaccgagattgacgaacggctaactgtcatcgaagaaaaacaacaagcaattcatgatcaggttgctagtttgcatcaaggcgaagtcgtcgctaatgaaaacttacgccagtttgaacttgaactacgtaacttgaagcgcgctgttgaaaaggttaatttacctggtttacaacagaaatatttggatttcttcttcgttgtttctgatgagattcaaaaacttgatcatgatttgaatcaaattaagattaatttagacgatatcgcgaagcaattaattctcgttcaagaggatttagatgaattgaaggccaagacggataccttaattgacagtgcattgattacggagcaattgttacaatatgccaaccgatatcgtgcagattttcccgccatccaggaagcctgtgtgacggtccaaaccatttttaatgaagaatacgactatgctaaagctgtcgacttattggcaacggcccttgaaaaggttgatccaggtgcttacacacaagttgaaaaggcctattacgaccaaaagtcagacgcaactaattagtcacttagatgctcaccagtccgagacaagacgcattttgtctcggatttgttttgttaaagattaattggttgtctttaataaccaatttgctataatgtacaacgttaaaacactaatttttagtaagaaggatcgatatgatttattttgacaatagtgccaccactaaaatcgcgccaggcgcacttcagacctatcaagcggttagtgaacagttcttcggcaacccctctagtttacatgtgattggggaaaaagcctttcatattttagaacaatcacgccaacaaatcgctgatttattaggcgtagaccacgatgaaatcttctttaccagcggtggaacagaaggcgataactgggtcttaaaaggcacggcaattgaaaaacgggcgtttgggaaacatttaattacgacatcggttgaacatccagccatcattaaatccatgcagcaactggaaaaattaggctttgatgtgacttatctacccgttgatcagtttggtcgaattgatccggctgacttaaaagcagcattgcggcctgataccattttagtttcgatcatggccattaataacgaaatcggaacgtgtcagccacttgaagccattgctgatattttgaaggattatcctaatattcatttccacgttgatgccgttcaagggattggcaaaggcattcaagaggcgattttcaacgaacgcgttgattttgtgaccttatcagggcataaattccacggcccacgggggactgggattttgtataagaaacgcgggcgtcatttagcgccgcttttaaccggtgggggccaagagcatgatttacgttctggaaccgaaaatgtgccagccatcgcggcaatggccaaagccttacgtttgttattgaccgatgagactgaaaaagtacaccgccaagcagctattcgagaacgactctttaaccatatcagtcaatcggataaaacggttatgttttcacaactgacgcctgattttgcgccgcatattttgtgcttcgcaattaaaggtgttcgcggtgaaacaacggttcatgcgtttgaagaacacgaaatctatatttcaacgacaagtgcttgctcttcgaagaaagggactgaatctagtaccttaaaggcaatgcacgtcaatgaaaaaattgcgacaagcgccattcgggtatccctcgatgaatacaatacactagaagaagcggatgcattcatcaaagcgttcgatcaaattaacgaacgcttcaaaaaaattaattcgtaaactaccatctaaaaggagataggcatgcaatacactgaaattatggttcgctacggcgaactttcgacaaagggtaaaaaccggaacgattttatcggtcggttaaacgggaacgtcacaaaggcgcttcacgagtataaacaactccggattcaccctaaacgtgaccggatgcatatcgttttaaacggcgacgatgcagaaggcgttatcgaacgtctccgtcacgtcttcggcatccaaaacttctcaccaagtatccaagttgatcgtgatttagattctgttaaagaaatggcgcttgccatgatgaaagaaatcggcaaacctgggatgtctttcaaagttaacacacgtcgttctgatcacaatttcttcttggatacgaatgatatgaaccgcgaattaggtggttacttatcagatgaattacctgaattagaagtgcaaatgaaaaaacctgacattactttgcgggttgaaattcgccaagatgcgatttacttaaccaaccaagtgattcaaggggctggtggcttaccagtcggttctgccggtaaaggaatgttgatgttatctggtgggattgattcaccagtagcaggttacttaacgctcaaacggggtgtcgacattgaaatggtgcatttctttagcccaccatacacaagcgacaatgccttgaataaggccaaagaattaacggcgaaattggtgccatacgttggtgggattaagtttatcgaagtcccattcacggaaattcaagaagaagtgaagcattctgtgccagaaggttacttaatgaccattcaacggcggatgatgttgcgtttaacggatcaaatccgtgctaagcgccaaggtttagccatttttaatggggaatctgtcggtcaagtggcctcacaaacacttgaaagtatgatggctatcaatgatgtcacaacaacgccaatcgtgcggccagttgcgacaatggataagaatgaaatcattgaaattgcgaaggatattgatacgtacgaattatcaatcatgccattcgaagattgctgtaccatttttgcaccaccagcaccgaagacccggcctaacttagataagacccggttctacgaacaacgcatcgatgtggatgccttgattgaacgctcacttgctggaattaaagtgacagaaatcaaagctggcgatcaattcttaaatcaagacgaagaaatcattgctgaactattgtaaactataaaaatcctgagaataacagtatgttgttctcaggatttttttggggagaagattcgggatttattttcagaatgaacgccggtgacgcttgacctttggtgttcactcagctaaactattaacaacgcgttgaacaagagcgattaagattgggctagtttagagagaagatgcatggctgagacgtcttccaatgaccaattaatcggtagcttgtgagctgttaacctgaaattaagtagggctaaccggacaatttcgttcgttaacaaatcatgagttggggactagtctagtcctaatttaggtggtaccgcgaaaaagcattcgtcctattgtgaggaatgcttttttgtttgccattaaacgcaatattttaaaggagtgaacaagatgactgatcacaaagaaatgtcaaccaaatatgatccaaatcaagttgaagccggtcgttatcaagattggttagacgctgatttattcaagccaaatgccaatccagatgccaaaccttattcaatcgttattccaccgccaaatgttacgggtaaactccatttaggccatgcctgggatacgaccttacaagatatgttaatccggcaaaaacggatgcaagggtatgatgtactctggttgccagggatggatcatgccgggattgcaactcaagctaaagtggaagcaaaattagctgaacaagggatttcacgttatgacttaggtcgtgaaaaattcatcgaacaagtctgggactggaaagatgaatatgccgcaaccatccacgcacaatgggctaagatgggcttatcacttgattattcacgtgaacggttcacattagacgatggcttatcagacgctgttcgtaaagtctttgttaccttatacaacaaggacttaatctatcgtggcgaatacatcatcaattgggatccaaaagcacggacggctttatcagatatcgaagtgttgcatcaagatgatgaaggggccttctatcatgttaactatccattgaccgatggttctgggagcatcgaaattgccacaacacgtcctgaaacattacctggtgatactgctatcgctgtacatccagatgatgaacggtatgcggaccttgttggcaagacggtcacattaccattaatgaatcgtgaaattccgattatcgctgatcactatgtcgataaggatttcggtactggtgctttgaagattacaccagcacacgaccctaacgattttgaagtcggtaatcggcatgacttaccacggatcaatgtcatgaacgaagatgccagcatgaatgaaagtgccggcaagtataacggcatggatcgttttgaagcacgtaaagcgattgttgctgacttgaaggaacaaggttatttgattaaagtcgacccaatgacacatagtgttggtcattctgaacggaccggtgtacaagttgaagcccggctttcaacgcaatggtttgttaagatgaagccacttgctgaaatggctttgaagaaccaagcaaccgatcaaaaggtgaactttgtgccagaacgattcgaaaataccttcacacaatggatggaaaacgttcatgattgggttatttcgcgtcaattatggtgggggcaccaaatcccagcttggtaccataaacaaactggtgaaatgtatgtcggcgaagaagcaccaaaagatatcgaaaactggactcaagattctgatgtcctagacacatggttcagtagtgccttatggccattttcaacaatgggttggccaaacactgaagcgcctgacttcaaacgctacttcccaaccaatacgttggtaactggctacgatatcatcttcttctgggtctcacggatgattttccaaagtctcgaatttacagaacaacgcccattcgaacacgtcctcattcacggtttaatccgcgatgaacaaggccgtaagatgagtaaatcacttggtaatgggattgacccaatggaagtcattgaaaaatacggtgccgatgcattgcgttggttcttaacgagtggctcaacaccaggccaagatgttcgtttcagttacacgaagatggatgctgcctggaacttcatcaataagatttggaacgcaagtcgtttcgtcatcatgaaccttgaagacacaccggcgccaacgaagatgccagatgccgctaaccttgatttaacggacaaatggatcttaagccaattgaaccaaacggtggcagatgttacacggctttatgaaagcttcgaatttggtgaagcgggccggacattgtataactttatctggaacgatttctgtgactggtatattgaaatggcgaaggaagtcctttacggagacgaccaagcagccattgccaataaacgttataacttggcttatgttttagaccaaacattgcgtctattacacccagtgatgccatttgtcacggaagaaatctggcaaagtatgccacatactggcgattcaatcgtcaatgcggcttatccagaagtgcacgctgaattagacgatccagaagcaacaacgcaaatgaatgcgttaatcgatctaattagaagtgtccggaatatccgttccgaagccaatgcaccactaagcaagccaattgatgtcttggtcaacattcaagatgcgccattaatgacgatcttcaaacaaaaccaagacttcatcgaacgcttcgtacatcctaagtcacttgaaattgctgaaggtttaacagcaccagcattggcgaagacagccattatcagtggtgcagaagtttatgtgccattggctgaattgctcgacttagacgaagaaatcgcccgtttagaaggcgaattgaaacgtttagacggtgaaatcaaacgtgctaaaggcaagttgtcaaacaagggcttcacagaccgcgcaccagaaaaagtggtccaagaagaacgcgacaaacaagcagactacgaacaacaataccaatcagtcgaaaaacgagtagcagaattaaaaaatgcataagtgcatcatcaacggttagcttctgagcatttgcctaacttagcgaattggcgctgtaagcgccgatttgataagtgtagcaaagcacaggaagctgttgatgaaaacacgttaaaaaagaagtgcgactcgagctggttaggctttgaggattaacagtaaaatgggcattgtggcgttttttgccatgatgcccattttgcagttaaccggaaaaggctgctcgaggagcacgttagtgaaagaagtgtgattggttgcgggtagcaactgagcatcaatacaaaaattccgttaattcaggttttaggattaacggaatttttagattaagcggaagttgttgcaaccaaaagcacgttaaggccaccttaaaaactgaggtggtctttttgtgtgcgccagtttttaagcatcgattcgcgtgcaatctatgctaaaatagagacagtttgttaaaggagattggcgatgttagtgacagattacgaaacagctttggcgtatattcattcgcgccccagattacataaagaagcgaacctgaaccgaatgacgcaattgttggcaggtctcggtaatccgcaagaaaaccaacaattcattcatgtgactggcactaatggcaagggatccgttgtcaaaatggtcagttgtttgattgaagagttaggtttaaaagtcggtcgttacacatcgccgtttattatgcggttcaacgagcgaattgttatcaatcaggaaccaatcagtgatgccgatttagtaactgttacgcaacaaattcagacaacggttgcccagattcaaacaactgaccccgaatttgaagtgaccgagtttgaatggatcacagcaatgatgtttctatatttcaaacaacagcaggttgatgtcgccgttgtggaagtcggaattggcggtttgtatgactcgactaatgtgttgacgccgctgatatcagttattacgtcgattggtcttgatcatcaggctctattaggcaagacatttgcagaaattgcgactcaaaaagccgggatcattaaggctggtcatccagtcgtgattggtcaattaccaaaagaagcactgacggtggttgaggaaacggcaactcgtttgaatagttcgttagccattagtggctgtgatttttcgagtgctgcggtcaaaacgttacctacttgggggcaacagttaactttccaaaatgacgcggtaacgtatcgacaattacagattccgctgatgggggattatcaaattgaaaacgccgcggttgcattacaagtattttggtgttacttacagttgacgcaacaaaaactagaggttcgagacatcaaacgtgctttaaaacgggttaactggcctgggcgcttcgaaaaaatcaacgatgagccgttaattatcttggatggtgcacataatccggaaggggtggcgcaattggttcagacaacgcggcatcaatttaaaaatcgtgacatttacctgttattcggagcgcttggtgataaaaatctggatgagatgttaccacagctcaaaaaaatagcgacgcggatggtgctgactacggttcctgataatccacgcgcggcaacagcggcccaatatgcagcagttgatgagacgattacatttgaaccggactggccggttgcattaaccgaattattagcggatgtgtcggctgatgatgtattactcgtaacgggttcgctatatttaattagtacgattcgccaatattttaaaggagaatagtcaatgacaactagaggaattatttttgatatggacggtctattggttgattcggagaagatttattaccaagccaatattcgggccgctaaagaaatgggctttgattttacacctgaagatcaccatgccatcttagggaccactgatacgtatttacgcaattattttaaagcaaagcttggttcggcaacggccgcaacagaatttattgatcgttcataccataacgtagcaacggttgttgaagcagatggtgttgcaattaagccagggttagtcgatttactagattactgtgataatcaggggattagtcgggtgattgcatcgagcaatttccgcagcatggtcgatgactttatgcaaagtactggcctacaatcacggtttagtcaaattgttgcgggagacgaagtgactcacggcaaaccgaaccccgaaatctttttaaaagcgttggatagattagccttaccagcgcctagtgccctagtattagaagactcacctaatggtgtgatggccgctagtaaagctgccattccggtgattatggtccctgatttaattgcaccaactgcgataaccaatcagcaaacacttgcgaccgttggggatttggctcaagtgattccgtatttagaaaaataagcccgttaattaacgtattgttagttaaaccaagaagacgcgtcatgcgtctttttttgtgggaggcaaacaatggcggggaatacaggacaattacaaccaagagaacaattaatgcagtacggcgcagcaagtttatcgaacgagcaattggcaatcgtcattttgcgttctggtaatagtcacctatctgttggtgaggtggcgcgcaaattgctagcgcattatcctgactttcgggatttagaacaagcaagtttaacgcagttggaaacactggcaggaattggaccagtcaaagcgattgaaatccaagccatctgtgaattgagtcaccgattgcaaacgcaacgaactctccggtttggtgtggtcgcatcgagccaaatggttggccgtcgcatgattgaaacactagcgggcgaaacgcaagaacaactgctagctgtttttttagacgttaaaaatcaaattattcagatgaaacagatttatattggcacactcgatagttcagttgcgcatccgcgggaagtctttaaattagcggtccgttattctgcagcaaaatttattttggtgcataatcatccaagcggccagttgttaaacatagtatcctaaactagagtactctaagtattcaaagtttaggatttttttattttagaactataactattaaatatatagaggtaatatttatagtagttaaagtattcgatggtggtggagaaatgaaggttcagaaggtattggtggaggacaaatcatatccattatacatattgctagataagaactttgaagtggtagaaccagttaagagatttataaagtacttggataatacggggaaagctccaaatacgattaaaacatatagttatcatcttaaactgttctatgaatttatgggtcaacgagggattgaattagatgatttaaaatttgaggaattagcgaattttgtaggatggttaagaaatccaacaggggatgtaaaagtaatagatttaaaaccaaaaaaggctaaaagagaagaaacatcagttaattccatacttaatgctgtaattagtttcttagagtatttaaatcggacagaaaattttatagccatagatatgtctaaagaggcaaggggacgaagttttaaagggtttcttcatcatataaataaaggcaaatcttataaaaaaaatgtcttgaagctcagagtcaaaaagaaactagtaaaagcattagagcatgagcaagttaaagtgatattagatgcatgttatacaaaacgagataagttacttattatgcttatgtatgagggtggccttcgaataggtgaggtgttatccctccgtatcgaagatatttctacatgggataacaggattcatatcacaccgagagatcacaatgaaaacggtgcttatattaagctaaaaaaagaacggacaattgatgttagcaaggaattaatgggcttatataccgattacttagttcatgagtacggggaagaattagagcatgattatatataattattacttttcagtaacctactgactaaaaagtgcgtgattgtgaaaatgacgctcctattgaataatatagtacatcagtaaaaaaaggctaataggagtgtggcagtatgagtagtaaacaacgggcgaacctcacattactagcattggcaatcagtgcttttgcgattggttcgacagaattcatcagtgtcggcttaatgccattgatgattaaggattttgggattacgatgagtcaagcaggactaaccgtatcgatgtatgctttgggaattacgattggggcaccgattttggcgattttaacaagtcgttggccacggaaaaatttattgtcggggattatggttgtctttatcattggtaacttgacggtcgcttttgcgccagtcttcgcctgtaacgccgattttagaatcaaaaatgggttggtcaccaagggcggttgtgatcatcttaattatttatggtctgatggtggcttttggaaatacgttgggtggcaaatggtcaaatcaccaaccgttgatggcgctattgaaaatgtttgttggcttgttagtgaccttgttgctattcatgttaacgttaaatgcccattggttcggtttaattaacgttttattgatgggctttttcgccttcatgaacgttccagggctccaattatacattgtgcagttggctgaaaaaatcacgccaaatgatattccattggcttcggctttgaatatctcagcctttaatatcgggattacgataggctcattagttggcgggcaagcatcggcagcttggggcttagacagtacaccaatctttggcggtatcatggtttttgtcagcattctgttgacgtggtatttgattcaacaaagtaaacaagctaaataatgagatggcagagagctccgcgaaggcggggctctttttttgaaacgtgctattggcgctagatttctgcgcctaactacaaaacgggaatcatggccgagtacgccataattcccgtttttaggttagtgctcaaaatctgggcaagcgctaatagcactcttattgaaacgtgcttctgatgacaacaacttccgcttaatctaaaattcccaataatcttaaaacctggattattgggaattttgtattaatgctcagttgctaaccgtcatcagaagcactctttttcataaagttttgttaaaggaattgcaaggcttggggcaatcctctaaaatggtaggaagatgctttttgacgtttaataagggagttatgggaaatgaccaattcacctgaaacaaaggcgacggatagatcttcacaaagtaagatgttacggggctccgcttggatgaccgctgggagtattttctcgcgaattctgggcgccgtctatgtaattccgtggccaatctggtttggcgcgaatttcttacaagccaacacattatttgcaaaaggataccaaatttatagtgtctttttagtgatctcgacggctgggattccaggggcgctatcgaaacaaattgcacgctataacgaaatgaatgagtatggcattggtcagcgtcttttcagaaagtcgctgattttaatgttggcaatgggtgttttatcagcgctcgcactctttgcgttagcgcccgttctagcagcgggtgatccgcggatggtaccggtcttccggtcattaagctggccgctattgattattccattgctcagtattatgcggggctttttccaaggctatgccgaaatggcgccgtctgcgatttcgcaatttattgaacaagcagcccgcgtgctgtacatgaccgtgaccgcttttatgattatgcaagtgtttaaaggcagctacgtggatgctgtgacgcaggcgacatttgccgcattcattggggctgatgccggcttgttattactgattttctattatttgaaacaacgcggtcgcatttcagagttagtggccaatagtaacaacgaattagaagtgtcaacgactgacttgttaaaagggattgtgcgccaatcaattccattcatcgtaatcgacgcaagtgtcaacttggtctatatcatcgaccaatacacgtttaatccgatgatgcatgatttcgtggttgccagtgatcatcagttgtataacttgtatgctttatttgcagctaatgcgaataaactgatttcaatcaccgtttcactcgctgctgccatggcggtcacggcgattccattgatgtcagctgcgcatgtgcggggcaatcaaaaagaattgcaacatcaaatcggcagtactttgcaattattcaacttagtgatgattccagcggcatttgggatggcggcggttgccggtccgctttacacgttattctacgcgcatgatacgcttgggattagtgtcttacaattttcatcttacatttctattatgctcggcctctttacggttttaggcgctgtcttacaaggcctctatcagaaccgcttggcattgttttacttattcatcggattcatcgtcaaaattgtggcgcagtacccagcgatttattttttccgtgtctatggcccgctagtatcgaccggcttagcctttgcgacaagttcggttttaatgattgcagcactgcatcgctattatcactttgcattacgcaaaaccattcggcgcttaatcggcgttttaggcttctcattggtgatgtatttggtaacggcgggggcagtcaaggggttataccttgtctttaacccgtacagccgtcttcagagcgttctagtcttaatgattagcgttggcctaggtgtggctgtttacgccgcattggtgcttaaatcgcgcttagcggactatgtcattgggagtaacttggatcggtttagaagaaagttgagaatcaaatgagaattgatcgctttttaagtcatatgaatgtggcttcacgcaaagaattaaaggtactttttaaagcgggacgcgtgcgcgttgatgggactgtggtcaaagatgcgaagttcaaagtgaacgaggcgaccgttgtctatgttgacgacgaacccgtgcgttatcaaacctatttttattggctgatgaacaaaccggcgggtgtgatttcggcgacgactgatccccagaaaacagtgcttgatttattggcaccagcggacttgcgggatgatctgtttccagtggggcgattggataaagatacaaccggcttattattgttgacgaacgatggcgatttaagccatgccttgttgagtcctaaaaaacatgtcagtaaagtttatcgtgccacgattgccgggattgtcacggcagaggatcaagcgcggtttgaagcggggctcgtgttgagtgattttactgcacaaccagcacagcttgaaattctgagtgttgatgaggcgcaacaagaaagtcagattaccgttgagattcatgaaggtaaattccatcaagtgaagcggatgtttcatgcggtcggcaaggaagtcttgacgctagaacggcttaagatgggaccactggcattgccagatgatttagaccgtggccaataccgtgcgttgacagatgcagaacttgcattacttaaagcgaattaataaacagcagccctttcaaaaggactgctgtttttttaagattgatgaatcattttagccatatagtgtggtaaggtctgaatcacttggctaggaagtgtgacgtattgggttttggcgagttcatcagcaatcgcactgtgggtataaacagcggcacaaatcgtctgatagtgggtgccaaattgaccacagaatgcggcaataataccagtcagtgtatcgccgctaccgccagttgccatggaaggcccaccgatggttagttgctgaacctgttgctgatgatagacctcagtgtgatgttttttaagcactaaagtcgcgtttggataagcagcgagtgcggcttgattagcagcaaccgtttgctgctcgattgcaacaccgctgaggcgcgcccattccatttgatgcggggttaaaatgagttgcgtattcgggatcgtcagtttttcatgtgcgatgattgatagtgctgaaccatcgataatcagtgtttgtgttggttggatggtttgtaagatttttctcagcagttcaacggcaaacgaagtaatgccaagaccaggtccgacaacaacgacatcagcagcctggactgcagacgaccactgcacgaagggttgttgataatcaatgaacatggcttctggtaagcgcgcgtgcagtccgctgagaacacttaagtcactagcaacggaaactaatccagcaccagcataaacagccgcacaggcactcataatcgcagcaccgccgtattgctgactaccaccaatgattaagacgcggccaaaatcgcctttatgactgatggcaggccgtgcctgcaggaccgcacgaacggttgaatttgtgatgacttgcatctgaatccctcccttatcaactattattataagcgaaatattaataaatgggtattggcagggctctgtaacactggtacaatagtcttgtagcacaatcgcccgtgtggcggaattggcagacgcgcagcgttcaggtcgctgtttgggtaaccaagtacaggttcgaatcctgccacgggcattatggattaaaaaaggatcgctatcactttagatagcggtctttttttgttcaaaaagtacatcgattattgattatttacctcattatgactggtttagccaatggattagcgacaattattagcactattcaaaaaaagttgcatcaattttaaggaattaaaccattagtagaaaacgatagctttaaataaatattttcttatcaatataattattatttgaactataaaaacggctgaaagctacaagctgtaaactgcatcgcgattaaaaggtcatttaataaataaaaacatcacaaacttggcgaatttcaataaaaaaatattaatagggttaaaacttattaaaaatatttttttgtcaataccgttaatttcagctatttacatttaattaatttatataatataatgcctgtggagcagagcaggattactagttcgcatattgtaggtcctcaaaatagatagaaggagtaatgcttattatgaataatcaattattaatgctcattaaatatcgtaatattttggattaattatttgtcacagttttgcaaaatgttgacttatcactcgaacaatatttgttgatggaaaaaatggatcgtgaaaaagaagaaacgcccggcaaccttgctgcttgtatgggcgtttctcgaccagctatttcccgccaatgccaatcgttgggtgaaaaaggattaattgaacgggctaatgtggggagttttattggtgatagtcgtaaagtatactatcgacttacaaccaaggggaaacagttattattaaagattagactaaacagtaatgacatgattgatagtttggattctggatttgttactaccaattgggatgaaattgataaccaaattgcgctaatgtccgacgcggttaaaagaacattcaatatcaatgagattcaaatcttttagagagactatcggaatctgaacgggggagttatttagtttagcgcgtgttaatgggcaggatcgaagcgatggatgtcgagtatgattatttttgaatgtaaccggttgcgatgaattggcataaacggtatattattaaggtatctaagggataggagagaactaagcatgacaattaaattaatcgcatccgatatggatcataccttattaactgagagtggccagttgccaccaaactttataccaaccattcagcaattacatgctaaaggggttcaattcgcagctgccagcggtcgaccaatgtacacgttaaagcaaatgtttcccgaacttgctgacacaatggtttacgtcagcgataacgggggggcaattggttatcaaggtgaaactttattcaaaagtttattgccgttagctgattaccaacggatggtccaattcgttaatcaaacgccagatgggattggcgtgatttgtgggatggacgcggcgtacgttgaaacacaatatcgagattatgacgcgactttgcggcaattctatgccaacattgaatatgtacctgatttaacgcaggttagtgttgaagccaacaagtttacgatttatttcccgggaaaagatagtcaagcacagtatgaagctgttttcgcacccgaatttgaaccggcttattcagtaacggttgctggtgttgaatggatcgatattatgaatcaaggcatcgacaaaggccatgcaatgcgctttttggcggattatttcaacatcacgccggcgcaaatgatggccttcggggatacttataatgataaagaaatgctgcaaaccgttgaacatagttatttgatggggaatgctgccgacgatatgatccaatatgcgacttatcgtgccgacactaatgagaactatggtgtgttaaaggagattcagaaattactttagtcaaccaatcgtagatgaattggtaatgctgggtagcatctgtttctaataaaatttcatgtgctgtatgaggtagaatgcgcaccgttgcgttgttaacggtgcgctttttgaattggttcgttaaatgccgcgcgcggcgaccataaccgccagctggatcgtcggcgccactcattacgagaactgggcgggattgtaaggcaagttgccaatcagcatgccgagttaactcagtgagggtgaagagcattgcaaaaccgctatttgaaaagacgtagccacacaatggatgctgttcgtaggccgccacgtttgcttgattgtaacttaaccatgaaaaaggtcggtgagcatcaaatcgtttaggatagaccccaaacgccaagttattccagacagtaccggggcgcttagctgcaatggcgccgattaatttaacgattggtaaggcgggtttaagaatgaagggtacatcgataacgcccatgaagatggctccagtaatcggcacttcagtttgcttaacatattgtgtcgctagcattgagcccattgagtgtccgagcgcaaataatggtagctctgggtattcctcgtggacaatgcgaccgattaaggtacaatcgttgactagcgtctggagcccgtttggcccgaaataaccgagctcatcgttggactgaacggagtggccttgcccaatatgatcgtgtccgatgacgataatcccacgatctgctaagaattgagcgaaagcatcataacgttcgatatattcggccatcccagttagaatttggacaactgcgaccggtttttggattggaaaccaagtcacggcatttaaagtatggattcgatcagtagattgaacggtcaatttttgcattggttagcgcctcccgaaaaagataacgtactttacgattcattttagcagaaacaatctagagataccaaaaggacgccaaacaactttaaccgttgtttggcgtcctttttagtcatgcttaaagttgcacatcatcgttaattcgtgttgcgcgtgagaagtatttcgaatagaagcgactgataattccccaatagtaaaagatgagggctaatgcgctaattaagacgaaatcgagtgggtaaggaatcaggttaattccgttgaattcccgactgcccaagaatgaaatcagcgaaagcaatgcgagatagataattaaccataagcttcctttgaattgggcccaagtattttcccagtgaatccgatactcatagtagaaataaaatggtaagccaagcataatgacgccaatcaccttaatggttgttggccacattgcccagtaagttgctaaactggcaaggataaaggataatggcgacatgattttcatccaaggtgactgaacagggcggttcatatcaggggccattttacgtaatgacatgacggtgaccgggccggttaaataggcaatcaacgttgcggttgaaatcacgctggctaacgttccccaacttctaaaaattgaaacgagtagcatgctgacgatggcgttaatgaccatcgcaatgcgaggaatattatattgttcgttcatgcggccgacaatcggtggcatgtgtttgttctgctttaatgctgctaatgtccgtgcacatgaagcgacaaaggaaacgccggttccaaagggtgaaacaaacgcatctaagtaaagtaagacggctaaccaatggattccaagtaaaatggctaagtcggcaaagggtgattggaagtttaaaccgtgccaaccgactttggcgagcaaggcgggtgaaacagaaccgataaaggtaatttgcaagagtagataaatcacaatactgatcccaagtgaaattgcaattccacgtccaatattccgtttagaatcacggatttcactgccgacattgattactgtttgaaaggcattgtatgaaaagataatcccagaaatcgaagtggctgcaaaaattttggcggaaccatagggcataaacgtcgccattgaatgcccgaagttgccagtatggaaaccagttgagactaacataataatggttaataatggcacacctaatttaaagattgcaatgaagctggtaaaacgggtcaagaatttaacggaccagaaatttaaaagggtgaagacgatgataaaggcaaagacgacgagcaagccacgattcgaaatttcagcgtggtgcataaagtgattcgtccagttagcccacgcccatggccaagaactcatatactggacagcagcgacggcttcgattgggataatcgtgactaatgatacccaattggcccacgctgcgatgaagccgagtaatgaaccgtgactatattgggcatagtgactcatcccgccactttcaggaaacatcgtcccgagttcaacgtaattaaaggcaattgcaccaatcacaattgcgccaacaatccaagagatgatggctgctgggcctgccacggtcgttgcctcccatgcaccaaacagccaaccggaaccgatgatggaacttaaaccgagcatcactaggctaaataaactcattttgttcttctctatcataaagacctcctgtgtatggtgtgccattatagcaaccatcaccgttggtttcaaattaaaaatgcggctaaaatgagtcgtgaagtctatcaaattaacaatggtaacgccttctgaattaattattaacaattaaaaaaaccgtcacaaaaagtgacggttgaatagttaatttaagtcaattgccccgttgaatggcatccgtttgtttaaaaagatttaatttacgatcgttccagaatgtttcagacatatcgcgatagaagatcgcagtctgacagcctgggcaacgtttgataccatattcaattggcgcctgacatgcagggcaatgaaatgcggttgattcaggaattgtattttgcgaatcggccattaaaaggactccaatcaagttgttatcaatagtataccgcatacatacgctatttgttaagcgtttaaacctttttttttcaaaaaatatgcacaaatcggaaataatatgctatactatatcaagtaatgcgagtgtagtttagtggtaaaactcaagcttcccaagcttgcgtcgcgggtccgattcccgtcactcgcttaaagattcatgcaaaagaggttgcaacagaagaaattttgttgcaacctcttttttattctctgaaatttaatcctcggcggatacccgacttacatcacactcttttcgttatcagacctaaggccgattgtttgtttaaaggcgctctgataaagtatatttattatctatcgactaaaaactcgtgacacttacgagcaatctaagtagtgggagcgtacgacattgacattattagagattaaagatattcacaagtcctattatatgaacaaggctgaatttaaagtcttaaaaggcatcaatttaagctttgaccgtggcgaatttgtttcaatcctcggggaatcaggcggcggtaaatcgacgttgctgaacatcatcggtgggttagatcaccaatacgatggggagctcatcgttgatgggacatctttaaagaatgcatccgaaaagaaatttgatgcttatcggagtcaaacgattggctttattttccagagctttaatttaattagtcatttgactaacttggaaaatgtgatggtgccacttgaaatgactgatctatcacataaggaacgggttgccaaagcgaccgccttattggaacaagttggcttgaaggaacatatccataaacatcccaaccaattgtcaggtggacaaaagcaacgggttgctattgccagagccttggctgctgatccagatgtcatcattgccgatgaaccaacgggtgcgttagatagccagaatacggccgagattctcgaaatcttacaaaagattgccgaagatggcaaactcgtcatcgccgtaacccattcacaagccgttgctgaccacggaacacgggttgtccacatggttgatgggcagattgattatgacaagcaattaaaaccagcttacccagctccaactggtccggtaattaagaagagtagtccattaagttttatgtctgctttcaaaatggcaatgcaacacatgcgctacgatattaaacggaatttgctcattatttttggcgcgtccattgggattttctccgtcattttaatgctaggcttgggtcaaggggtgactggctatattaatgatcagatttcatcgcaagttaatccaaatacgattcagattgcaagaaacctcacgcgcaaacagattgaagccggtgaacaaggtaacttagctgataaggatatcaaccgccttaataaggtcaaaaacgtgacgaaggttgaaaagggctactacatgaatggtgtccaagtgcactatcaaaagaagagtgaaacagtccaaatgttccaaacgtttaataaaaccgaacgtgtccaagatattaagaccgggactaaacctggggccaacgaaattattttaacgaaggcaatggctaagaagttagataaaaattacaagaagatggttggtcggacagtaaccacttacgtcaatgccattagtaaggatcaacgtccagttcaaatgcgccaagatgtgaaagtttcagggatcatcaattctgggactgaagccgtcacatatggcacattagccaagatgtaccaagcgcaaggattagagtttgcacccaactttgcagcagtcacggttaataagacccaaaatgttaaagccgttcaaaataaaatcaaaacctacactagcaaagtcaacggtaagacacaaaaggattaccaaatcacaggggttggtgcgatcctcgattcaattaacacttacttgatgttagccttctacgtcttagctgggattgccgggatttcattattggtttcagcaatcatgatcatcgtggtgctctacatcagtgtgtcagaacggacgaaggaaatcgggattctacgcgcaatcggcgcccgaaagaaagatattcggcacttattcgtctcagaagccttcttgattgggttattatcaagtgttcttggtgccggcattgctggccttggacaattgcttgtcaatacgttggcccaaccattaacgcatatgccaattgtggcaattaccagtggctacgtcctattcgggataatcatcagcattatcatcagtctcttagcggcactagcaccttctcgtaaggcagctaagttagatccaattgaagccctcgcggcagaataattgcgcttgaaaagtgcagctaagttctatatactagttatcaagttcgaacagtcaaaagaatagcatcaacagcgatttatagcgagctcacagacggtgtaaggtgggtaatcaagttgacgcggcgcgcttttggttgaacaattgcatactattgagtggatcgattgatcaatcagagtggtaccgcgggaattctcgtctctttcatttatttggaagggacttttttttgttcacaaatattaggaggctatcaacatggattttaaacaacaagtcaccactgccttaatgggcgttttaggggacagtttaccagcagataaagtagcacaactcattgaaacaccaaaaacatcagacttaggggactatgcttttccaacgtttatcttagcgaaaacattacggaaagcaccccaacaaatcgcccaatacttagtcgcagaaatggatcaagccggctttgaaaaagtgattgccaacgggccatacatcaacttcttcttggataaggctacgtttagcgaccaaatcctcaaaaccgtcttaacgcaagccgctaattacggccaaagtgacctcggtaaagggggcaacgtgccaatcgacatgtcatcacccaacatcgctaaacccatctcaatgggccatttacggtcaacagtgattgggaactcaatcgccaagattttgacaaaagtgggcttcaacccaattaaaatcaatcacttgggtgactggggtactcaattcggtaaattaatcgtagcttataaaaaatgggggagtgaagaagaagttaaagaagacccaatcacgaaccttttgaaatattacgttaagttccatcaagaagacgttgaacatccagaattagacgatgaagcacgggcatggttccgtaagcttgaagccggggatgaagaagcaacgaagttatggtcatggtttagaactgaatcattaaaggaattccaaaagatctatacgatgttaggggtcgaattcgactcatttaatggtgaagccttctataacgacaagatggacggtgtggtcaacgcacttgaagcaaaagggctcttacaagaaagtcgcggtgctgaaatcgtcgacttaacagcttacaacttgaacccagccttgattaaaaaatcagacggcgcaacactctacatgacacgtgatttagccgctgcgatgtatcggcatgacacatacgacttcgtgcaatcattgtacgttgttggtggcgaacaacgggaacatttcaaccaaatgaaggccgttttaaaagaaatgggcaacgattggtcggacgaaattcaccatattccattcggcttaattactcaaggtggtaagaaattatcaacgcgtagcggtcgtgtgatcttattggaagaagttttaaatgacgccgttaacctagcacaacaacaaattgaagccaaaaaccctgatttaccaaacaaagaagaagttgcaaaacaagtcggcatcggtgcggttattttccatgatttgaagaatgatcgtttagataattttgactttgacttagaagaagttgtgcgtttcgaaggtgagacaggtccatacgtgcaatacacaaatgcccgtgcccaaagtattttgcgcaaggccaaccaagaagtcgcaatggacgctgacttagtcgtttcagatgccaacgcttgggatgtcttgaagatgctcggcaacttcccagatgtgattgtcaaagccagccaagaatacgaaccatcagtgattgccaaatacgcattacgcttggcaaaagccttcaacaagtattacgcaaactcaaaaattttggcagacgacgatcaaaaaaatgcgcgtctttcattagtgaagagtgtcagcacagtcctagaagcctcactagacttattaggcgtacaagcaccaaaagcaatgtagagtgcgtttaaagcggtttgactctgagcatttgcctaatatcgtgaataagcgacgcagtcgattgtttgcgatatgtagcaaagcacaagagtcagctttaaaaagcatgtttaaaaacagagtgcctttgaaacggtttgaccttgaggattaacaaaaaaatagcgattatggcgggttttagccataaccgctatttttaggttaaccggaaaggtcagtttcaaaaagcacgtttcagatcagagtgtgcaagcaggcggttatatttgagcattaactggatttggcgaattgacgatgtcatcgtcgatttgataaatttggttaagcgcaggaatatgcctggagcacatttaagccacccgattaaatcaatctggtggcttttttatttttcgaaaaattctaattcgatgacaaccccgccaacttccgttatagtaatcttgaaatagtgggggagggttcactaatggtattagtcttaaaacgccagattaaagggattccggttttggaagtggtcgctgacgaacaacgtcatcagccattaccactcgtgatttactatcatggctggcggtcagcaaaagaattggttttaacgcaagcgcgtaaactggctgaagctgggatacgcgtggtattaccggatgcactgaatcatggtgaacggctgcaacctgtttcagagattccgtcatggactttttggcaaagtattcaaaccaaccttgccgaattcagtttgattgttgattactggcaccaacttaatttaattcaagctgaccgcatcggcgtcgggggtgtttccatgggtgggatgacaacggcggcactcttaaccaagcatccagaaattaaagtggcggcttgtatcatgggctcgccggcaccgctagcctatgcgcgcttagttcgtgaaaatatccgtgcgcatcagttagcacaacctgacgatctagggttattgacaagttggttaacggcctacgatttaactgaacagccgcaggcaattgctcaacggcctgttttattctggcatgggacagcagatgaacgaattccctatgaacaagtagcagcttttgaacagcagattaaaggtcaaacttatgccaaaaacgtgacatttttaacagcaaatggtgaacgccatctggtgaagccagcgctgatgaacataattacagatttttttagtacgcaactataaaataaatcatttttaaaaagccaacgttaaattcttagcgttggcctttttgacgtgttttatttcttggaatattaaaaaaataatgatttataatggggattaaaatacgaatttagacgactttttcattggtttggtatagcggaaagaatgctttttattatttgtataatacgtgttgtatgcttatcggtctaattgtttatcgcagtaatatggattttatgtgtcgataatatttatggaaaccattatctgtttattatatacggagttgatgaagtgtgttaagttaaatgtgttccaaaaataattttttaggagatgagactatcaaaaaagtagtaggtattttagcgttcggcattttaacgaccagttgcatgagtattttacaagaagcaagggctacgaccagttctaattaccaaagtaagcaaagtgaggtgcttgatgatagcctccaacctaaggtgaggcaccagaagggtgtaacacgttcagaaaaggcgccatattcaaaactgtatattggccgcggtgatgttaataaagaattggctcggcaacaaagggccttgagttattcaagcttagagccttccggattatacgccaaaaaaggggacgtgctgacggtgagcaaaacgggtcaagacttgatgtcgctgacgattggctcgcctgagcgagatgttcagaaacgatatccgctcgtaaatggggtgacgactattacagttgaaaatgatggtcctatttatgtgacgaatccaaatgattcaggcggtactagggtgtcaatctttgatgccactggtgaaatgccgttctttgatgcaaacaagacgagtgtcgaagattttaagaaacaaatgactgaaatgacagacgcaaaagatgttcaacttgttagtgatcgtgctttaattactgtgagttatgagatggcaaagaaatatttgggggatcccaaagcgttaatggctaattatgaccgattcctggtcgctcaagatcgagtttcagggatcagtaatgaaggtcggccggttaacttttcagatcgccatttacaacatttcttagaatcgccatcgtattatatgtatgcgacaaacgaatacatgggttttaaagacgatgcagctatgaaaagtttattagaacttcaggatccttgggaaatctggcatgaaagtggtcatcagagacaacaaaaaccatggacatggagaaaagttgtcgaatcgagtgttaatatttattcgttagcagcgcaaaaagaaatgacgggtgcgatgcctgatttagataagtattatccagaaatgtacgcctatctaaattctgatcataaaaacttcaatcaacaaggggactttgtcaaaatgacaatgtttgcccaactagcaaacacctttggcgatgatttctacccgaccttacatcagtattatcgcgaaaatcagttagactatgattcaaatgaagatcgaatgcagcattttttgttacatgtctctgaagtaacgggctataatatgctcccttattatgaacaatggggatttaaagtttctgaagaagtacagaagaaaatcagcaactacacaacgttgtctgacccaatttggttaaatgacaatcaaactaaaaaacaattgccaatgagcttaatgaaggctgtgtcgctcagtaaacaagggattaaagttgacttaacaaactatcaaattaatatctttaaggatcagaaattaattgttaagaaaaatggcaaggtgatcgcggagttggctgataagaaaccagctaatgggacagttattaatgatatttggcagattgatgaaccacttgatgtaaccgatatgattatcattgaacaacaaaatgccaatgggacttataatcggtttaatcaatcgatcagtgggacttcgcttagggaacaattggaaaactatttaaacacaacaaaaccaatcgagacgattctaacgcaagataaattaaacaatctacgccaacaggttgatgcactacaacctaatactgataaagaagaattaatggagatggttaaaaagctccaacaaggatatttagacgtattagttggtgaaattgaactgaattcagaatcagaacttgtggtgacatttgctgatggaaaacttaaggaatatgacgatttaaaagttcaagcagatacacatacgattgctcaagtaacgaatggtaagccgaatgttggtcgtgttgaaggaaatcaattgattattccaaaccaaaaagatgccactgcgatctcgatagcggtgactttaccgcatggcacttatctagtgaaagtgattagccaatcggtgcttgttgctagaaagttagtatcggatttatttgaacaggacggtaagttgaaaccaaatttgacgctagaagtgttagatcgagcatggcagcaagtaaatcagttaccacaagacagcaaagaagcgctagcgaaaaaaatgaaggaggcacaacagttattcttgaatgcgcttattgcggatgtaacgcttaaagatgccaaaatgatggtgacttttgcaaatgacctatttaaaaaatatacgattcttgtcatggaagaagaccacagcatagggacaatagtgtttggccaggcctttgagggagaattaagcggcaatgtctttacaccaatgcgtttaacagtttcgggtaaaacgtatcgggtaaacgttatgcacaatagcggtacctatcaagttaaaacgttggtagctgattgatgggttatagcgaaaccagataaactaatctaaaggcttttttatgaaattaaattgaaatacaaaattgatatctatcaataaaggctgagcaatagtgctcgcctttttatttggtttcaacatttgataatccccatttccgtggtagtctgtatataaagcattatcagatggaggttaggcaaacgtggaaaatggacgacttagacgtgctagtcagtttaataagacacggtttcgctttgtgggcaaagggttattagttggggcgttcactggattggtggtcagtttatttcgcttagcgattgaaaaaggactggcctttgttatcactatctatcaagggttaaatgcacacccgtggtattgggtgccattggttagtgccaatttattgattggcctacttgtggcacaattattaaaaaaggaaccgaatataagtggttcggggattccacaagttgagggacaattggaaggtgagtttgatttcaattggtggtcaatcctgtggcgtaaatttgttgggggcattttaagtattgcacctggcttattcttgggacgagaaggcccatcgattcagctgggggctgccgttggacagggggtcgccgctaagttgttaaatcgcggtgctgttcgtcggattttaatcgctagtggggctgccgcgggcttatcggctgcgtttaatgcaccaattgccgggacctttttcgtactagaagaaatctaccataacttttcaccgttagtttgggtgacgtcgcttgctagcgcaattgcagcgaacttcatttcattaaatttttttggtttgacaccgacattacatattacgtactcccaaagtttgccaattaatcagtattggcatttgttgatacttggtgtcgtattaggactgttgggatacgtttatcagaaggtattattgtggttaccacaactttatgcgaagctcccgctgccaaaagcgtataccggattagtgccattattatgtgttttgccgattggttatttctggcccgaaattttgggtggtggcaatggattgattgcacaccttggacaaaatttaccgacaaccagtgtggtggccggtctattcctattacggtttgttttttcaatgatttcatacggttcaggattacctggtgggatttttctaccgattttatcactaggagctttaatcggtgccctttatggactcataatggttcaacttggttggttagcaccagtttatgttcccaacttaattatttttgcgatgggtggttactttgccggaatcgggaaggcgccatttacggccattctactagtgaccgagatggtaggttcgctcgtgcacttgatgccattagcaattttatcgttggtggcctacatcgtcgttgacttaatggggggcgcgccaatttacgcatcattattgcaacgcgcacttggcaaaccacatcgtaagttagcaacattctctgatcgcttggaggtaccagtgtttgcgggcgcaccgttagaggatcgccaagtccgtgaagtggactggccaaagacatgtttgttaatcgcgattgttcgtggcgaatccgaactgattccgcatggtgatacgttgatccgtgctggtgacacgttgattgtgttaacggatcatcagctacgggcgacggtgcggcggcaaattgaagacgctgcccaagccttgcgaaatacggatgagaatctcgtgaaataatcgataaaaaagtggtgattgactactttttatgctaaagtattaaaagacagtgtagatagaaaggtagggaattaggttggaaaatcttatcctgaacttattattaatcgattcaatcttgattgtgattgcagtcatgatgcaaccaagtaaacaacaggatgctttgagtgcgttatcaggtggttctggtgatttatttggcaagcaaaaggcccgtggtttcgaagctttcatgcagaaagtaaccgttgttttaggggctttattcttcgtctttgcattagctttagtgtacttatcatcacactaatacatgtgagacgggtcgaattctaataagaacgttgatgcggtctcctgttgaatggcaggagacctttttaaatgaattcaagcagtaaggactttgggggtgagcgcatgtcttatcggttgccgcaaccgttttattttgacggtggttcagtcggggttgtgttgttacatgcttatacaggtagtgcgaatgatgtccgtatgatgggccgctttttggagaaaaatcagctggcggttagtgcaccacagtttgcagggcatgcaacggctgatccaaccgaggttttaacgcgcggttctgtcgatgcatggtgggccgatacggtggctgcgattgagcagttatccgcggctaacaaacaaccgttatttgttttcggattgtcattaggcggattgtttgccatgcgggcattagaagaactaccacaagtttgtggtggtgggatttttagtgcgccagtactcgaaggaccgactgctaaattgacgccgctctttggccaatatgctaatcgaatcatgcagttaatgggcgtcccagctgcgcaacagacagcacgtttggcgactattaatcagcaattaccacaacaacttgcatcaattgatattttcagtcgacaagttgtggctgacttgaagcaaatcggagataaaccggtcttcatcggccaaggcggacaagatcaagttattgatccaacacaagcccaagtcttacaccagcaattaacgcaacaaaacataacagttgattatcattggtatccacaagccggccacgtcattacggtcgatagtgcgcatcaccaattagaaacagatgtcctagaatttataaaccgttttaagaaatgagaaagaggtgttgatgtgacacaagttgaacagatgaaagcagcgattcttgcaatttttgaagcagatgcaacgcaacaattaaacgtatccgaaattagtgaacgaatcggcgttgccggttcacaagggttcaaagacctagtgaaagtattagcagaattagaaggggataagacattgaatatggacgatgccggtaagttcagattaccagccagcaaccgccttgttgaaggggtcttccatgctaacgatcgtggctttggcttcgtttcaatcgttgataaggaacctaatgatccagatatctttatcgccccacccaatacgaattttgcgatgaatggtgacacggttgaagtggccatcattaaagaagccgaagaaaacagccgccgcggtcctgaaggaaaagtggcgaaagtgattacgcgggggattgaagaaatcgtcggcgaattcatgccttattcagatatccaaaaagaaaaaacaggctggattggatacatccaaagtcatgccaaaaaattaagtaattaccgaatttatttaacggataatgggttacatccacaaaagggtgacatggtccaagttgacgttaccggttacccaagtgttgaggcgccaggtcaaatgctggggattgccaaacaagtacttggtaacaagaatgatcccggcgttgacgttttatcaatcgtgtatcaacatgatattaagacggacttcccagaagaagttcggcttcaatcagaagcgattccagatacggttttagaatctgataaactaggtcgtaaagatttaacggatcaagacgttgtgacaattgacggcgacgattctaaagattttgatgatgcagttaacgttaaaaagttggcaaacggcaactactacttaggggtccacattgctgacgtgagttactacgtcactgaaggttcaccattagacgttgaagccttagaacgtgggactagtacttatttaactgatcgcgtgattccaatgttgccattccgcttatcaaacgggatttgctcattaaatccagacgttgaacgcctcgctttaacgtgtgaaatggaaatcaatgaacacggcgtggtagtggatcacaagattttcccaagtgtgattaagtcaacagcgcggatgacatacaaaaacgtcaataagatcttaacagatcaagatgctgacttacgggcgcaatacgaacggctcgtgccaatgtttgaaacgatgtcagaattacatgaaattctcttgaagaagcgtcataaccgtggtgcaattgatttcgaagaagacgaagctaagattatcgttgatgaaaatggcaaggccatcgacatcgaattacgccaacgcggtctttcagaacgcatgattgaatcatttatgttggctgctaatgaaacggttgcagaacattacagtactgctaatgcacctttcttataccggattcatgaaacaccagatgctgataagatgaagaatttctttgaatttatcacggcttatgggattcaagcacacggttcaagtaagaaagtgacgccaatgatgctccaagaagtcttgacgcaaattgaaggtcaacctgaacaaccgattattacaacgatgttattaagaagtatgcaacaagcacattattctgatgaatcccttggtcactttggtttgggtgcggaattctacacgcatttcacgtctccaatccgtcgttaccctgatttgatggttcatcgtttgattcatagttatgccacaaatgggatgacgattgaagaaaaagaaaaatgggcacctaagttacaaccaatcgcagaacaaacatcccttgaagaacgtcgctcaatcgatactgaacgggaagtcgttgatcttaagaaggctgaatacatgcttgataaggtcggtaatgaatacgacgctgtgattagttctgttaccagctttgggatgtttatcgcattaccaagcacggttgaaggcctcgtccacatctcacagatgaaagatgactactatagctttgttgaaagccaattagcccttgtcggtgaaagaacgcataagatgttccgcattggccaaccagtacgggtcaaggtcgcgaatgttgatttagatgcccactcagtggactttgaattattagccggtgaagaagtgccattggcttcggctgaaatcttaagcaagattgaagcacgaccaaaacgtccagcacgcccacgtgatcatgaaaaaggcggtcaacgtcgtggtgatcaaaagaaaaacaatcatccaagacgcccagctgcgaacaaggactcacaaaaacgtacttttaaaaagtaggtgattgaatggcaaagaaacatcctcaaaaaccagcaaatttaattgcacagaataaaaaagctggtcacgattataatattttggaaacattcgaagcaggcttagtgctcactggtaccgagattaaatcggtccgtaagggcaaaatcaacttacgtgatgggttcgcccgcgtccgtaaaggagaagcctatctcgaaaatgtccatattagcccttatgaacaaggcaatcagtttaatcatgacccattgcgcaaccggaagctattgttgcacaagaaggaaattaccaagattggtgctttaacgaagaataaggggattacgattgtgccgttacgggtttatttgaaacacggctttgccaaagttttaatcggcgttggtgaagggaaacgggaatacgataagcgcgaaacactgaaacgaaaagaacaagatcgtgaaatggcccgcgcagttcggattaaaggttagtcctttaattaaaatctaagtataaagtcaaaaagctatcacaaaatttacttttgtggtagctttttctattggaagtatttggtttgttggcggttacaagtgggcttttattacgcaaaaattataaatgtcttcaaactgtaatataacgtcattaatctgcaatcttcttgcggggattgttgcgtataatcaagtctgagttatgaatggaggagtttaacaagatgcgatttagaaaactagcgttagctgttgttacctgtttagttgcaatggttacgatgggcacatctgttagtgctgccagtttgagcgaattacaagcccaagaaagcagtacccaaaaaagtattgatgatacaaattcgaagattcaagccactttaacgagcgtgaatgcgaagtatcaagaaattaatgccttaaaggaaaagattaaggataacgaaaaaaatatcgaacaagcacaaacgcttttgaaaaagcaacaagccactttagcaaaacgtaaaagctatgctaaggaacgcttgcaatcacttcaacgaacagccgatgaccgcaacgttgtcaacgcactattgtcagctgattctttgagtgatttcttcaaccgggcttacacattgacggttcttcaaagtgctgacaaccataatatggatgaattagcacagagttaccgtgatacacaagccattcaagataagttacaagctagcaagacagaacttgatgaacaacgaagcagtttggatcaacaatctgtcgaactggaacaacaagtggctggcttaaagaataatttaagtcaaagccaagcggatcttgcaaaaattgctaaagaaaaagcagaagaacaagcacgtgaagaagctgaagccaaagcggctgaagcagctaaaaaagcggccgacgaagcaacacaagcgccaattgcaccagttgtggacacaaatgcccagcaagccgatttagcaagcgctgctgatggcaaggccggacaagcgattcaagtgcaagcaacggcttattcaactgccgaacctggtttgagccattttggtgcaactggaactgatttaactaaaaacccaaattgtatcgccgttgatcctagtgtcattccattaggctcacttgttttggtacctggttacgggtatgcaattgctggtgacatgggtagcgcgattaaaggtcacattattgatgttcattttccaactgttgcggcatgtaagagttggggtcgtcgtcatattacaatcacaattattaagtaattttaaatacagccttttttgaggctgtattttttacttcgtggattgttttggtaaaataaataataaattatatttaataaaggttgtcagggcaactcataatgaacgttgttgatgattattagtgaaagttagttgaaatatataatttaatactatagactatttatattgctttaaatcgaagcacggttaagattagctgactaagtattatttaaatcggctatcttagaacacggaagaattgaagtactgaatagtgtgagtatgaaacttatcgatggttaactattgatactgaaagtttcagcatgtaggaggaatagaaatggatacgagtaataacaccgatttactcggtagcacatcagcagattttatggaattcgcaggtttataccggtggttgattaacaaccttagcgaatcaatgagtcgtgaaagccaaaaatacggtttatctttcgaccaatttttagtgatgcacgagattcaaaatgcgaataatgaaacaactaacagtgcattggcagataagatgcaagtgagtcgttcagcgatttcacgtcaatgtcgttcattacgtaagatggcttttatcgcagaacaatctgatgaaaatgaccaacgcattcgtcgcgttcatttgacggaaaagggtttggaagtttatcgtcatctcttgttctattacgtagacttgtacaaagatttacaaaatgaaatcggccaagatactgttggcgcaacaatcgaccaaagcaaaaaaatctttggtcgcatggcatcaatgaacatggatcgcccagaagcaaaataaacgttaaaaaaggccgcaaccatttgttgcggcttttttttgtgcgattagcaacggtcgcgcataatgacgcgcgtcactttctttgttagaatagagctagtcactttacgaatgtaggaggaacaacatgggttctcaaaaaaaattattattagtcgacggcaatagtgttgcatttcgtgctttttttgcaatgcaccaagctttagaccatttcaccaatcaggcaggactgcacactaatgcgatttatgctttcaagaatatgttggatattattctgaaaaagattgaaccaacacacgtgttagttgcttttgatgcgggcaaaaccacttttagaaccgaacaatttgccgactacaaagggggccgttcaaaaacgccacctgaattaacggaacaatttccttatattagagaactcttaacagcatatggtattcagtcttatgaactcgctaatttcgaagcggacgatatcattggtacacttgctaaacaagcagaagctgatggtttcacggtcgatatcgtcactggtgatcgcgatttaactcaattgacgactagtcagacaaccgttaacatcactgttaaaggggtcaatgaaattgaagcgtatacccctgaacacgttcaagaaaaactcggtttagaaccaagccaaattatcgatttaaaaggattgatgggcgatacctctgataattatcccggggtgacaaaggtcggggaaaagactgcgcttaaattgattacggaatttggaaacattgaaggtgtctatgaacatgtcgatgaaatgaaaaagagtaaattgaaagaacatttgattgaagatcgcgacctagctttcacgagtaagacactggcaaccattaaacgtgacgcgccaattacgattggcttagacgatgtggtgtacaacggacctgatatggcagctttggttgctttttaccaagaaatgaacttcaagtcgtttctaaatcaattagatgttgcaccagttgaacccacggctactgaagactatcaatttacagtattaacccttgataacatcgccgatgtcgtgacaaccactgaaaacgttgcgtttggcatcgaaatgttaaccgacaattaccatacagcagacttgattggcttttacattggccgaccagaccactggtatgtcagcgacgacgtaacactcttgacagaatcggttttaaaaacgtggttagaagatgctaaacgtccgaaagcagtttttgacgtgaaacgcaatcaggttgcggtgaatcgcttagggattcacttagcgggggttcaatttgacttactattagcgtcttatttgttgaatacaacgaataacagtaatgatcttggaacggttgcaaatttacatcagtatcaaaatgtccaaacagatgaagctgtttatggcaagggggctaaacgcgcagttcctgtcgatccaaccgtgctttatcaacatctgattcaaaaagcagcagctatttacaaattagcaccacaattgacagaacaattaaaaaaacatcaacaattcgatttattcacggatatggaattgccattagcgctagttttagcggatatggaaatcaccgggattcgagttgatgcaagtcgcctacaacaaatggggggtgagttcagtcaaacgctgaagattttggaagaaaagatttatgcggaagctggcgaaacgtttaatatcaattcgcctaagcaactgggcgtcattctattcgaaaagatggggttaccagtgattaagaagaccaagaccggctattcaacggcggtggatgtcttggaacaacttaaaaaagacgcaccaattgtccaaaccatcttggattatcgccaaatcgctaagattcagtcaacgtatgtcgaaggattattgaagtcaattcatcaagataataaggtgcatacgcgttacttgcaaaccttaacgcagactggtcgcttgtcatcggttgatcccaacttacaaaatattccagtccgtctagcggaaggccgtaagattcgccaagcgtttgttccaagtcaaccgggttggcagatgtttgcttctgattactcccaaattgaattacgagttttagcccacatttcgggggatgccaatatgcaagaggcattcaaggaagaccgcgatatccatgcgaatactgcgatgaagatttttggcttatcgagcgctgatgaagtgacaccagatatgcggcgccaagcgaaagcaactaatttcgggattgtttacgggattagtgactatggcttatcacaaaatattgggatcacaagggctgaagctaaacgctttattgaagcgtattttgaacagtatccaggtgttcatcaattcatgcaagatatcgtgaagaaggcgcgcgaagaaggctacgttgaaacgctcttccatcggcgtcgctatttaccagatattcacgctaaaaacttcaatttgcgctcatttgcagaacgcacggcaatgaataccccaattcaagggagtgccgctgatattattaagatggcaatgatcttgatgcaagcggaactgaagaaggcaggattacaagccaagatgcttttacaagtacatgatgaattgatttttgaagcaccagaatcagaaataccaatgttagaaaaattagtaccaagtgtcatggattctgcggtttcattagcggtgccgctgaaagttgaaagtggctttggaccaacttggtacgatattaagaaataaggggacacacaatgccagaattaccagaagttgaaaatgtgcgccgcggattggaacaattagtggtcggtaagacggttcaagcaattgagattcgctggtcgaaaattatcagtaatccagacgatgtttttgttgaaggtcttgttggacgccaaattatcggtgttgatcgacgcggtaagtatttattgattcgtttcgatcaaaacttaactgttgtgagtcatttgcggatggaaggcaaatacgaagttgatgatcaatccgtaccaatgactaagcacacgcatgtgatttggacatttacagatggacaacagttacgttatcttgattcacgtaagtttggccgaatgttattaattgaaacgggtcaagaaaacactgtttctggattgaaggacttaggggttgaaccaaccccaacaacgtttaagaaaaccgccttctatcaggcgttacagaaacataaaaaagcgattaaaccactgttgctggatcaaaaaattgtaacgggtcttgggaatatctatgtggacgaaacgttgtggttgagccagattcacccagaaacaccggcgaatttattgacgaaagctgaaacagatcgtttgcatgatgaaatcatcacagagttagaactggcaaccaataacggtgggacaacagtcaatacgttcttaaacgcggcgggtcacgctggggcctttcaggatatgttgcacgtctatggtaagaaagggcaaccgtgtgatcggtgccagactccgattgagaaaattaaagtagcacagcgtggcacgcatttctgtccgcggtgtcagattaagagagaagcggttcaatgacgtattttctaggtttaacgggtggcattgccagtgggaagtcgactgttgcggcattgtttaaagaacagggaatcccggtgattgatgctgatcaagttgctcatcaggtattagcgactaataaatcggtacaggcacaattgcaagcagcctttggcgaagcagttgtcaaaaatggtcaagttgatcggcctatgttgggccagcaagtcttcggtaacccagaggctttgactcagttaaatgcgattactgggcccgctattttgacagccattaaacaacagatgcaagcagcagatgcaccgctggttgtgttggatgtgccactgttatatgaacaacactacgagcaatattgcgatggtgttgcagttgtctacgttgaacgtaaaacacaattgcaacgtttgatggcgcgtaaccaattgactatagaacaggcaaatgcgcgaattgatagtcaaagtgatttggcgaccaaaaaagcgcgagcggatttcgtgattgataatcaaggcacacctgcaatgttgcggcaacgtgttttggcgttgttacaacagttgtgtcataacaagtaatacaagcggtcgaacagattattctgttcgaccgcttttttgtttggaaaaggcgaaatgccttgagactgatacattttttgtttagcctgcttgcctggcatgttatactactgttatactaattgttttaaaattggattgaatttgaaacgaattaatcaaaagataagaaggtgtcattatgctatgtccacattgtcatcagaatagttcgcgggtaattgatagtcgtcccacggatgaagggcgagtgattcgtcgtcgccgtgagtgtgagaattgtcgtttccggtttacaacgttcgaacgagtggaacaaaccccattgttggtaatcaagaaaaacggaacgcgcgaagaattcaaccgtgataaattattgcgcgggctaattcgtgctgctgaaaaacgccccgttacaatggagcaaatgactgaagtagttgatgaagttgagaataagattcgctcattgggtgaaaacgaagtctcttcacaagccgtcggagaatacgtgatgcgcttgttaccagatattgatcagattgcctacattcgctttgccagtgtttatcgcgaattcaaggatatgaatgtctttatgagtgaattacaagaaatgatgaataaagaaaagacgaagaaatcgaattaaggaagaggggttagccgatgtcagatgcatttgattttttgagtccaaaagacggcttttcagtgacaaaagctaactatttgaccgatttcgatcaaacagtcgtcacttacttatatcaaccattaatgggggctgttgcttacagtctctatcttttgttatggagtcaaaccaagaaagaaacggaacaacattttcaaacacatgcgactttgttaaatctgttgagtgttgatttacctgctttttatgacagccgcagcaaattggaagcacttggtttaatgcggacgtatcaaaaaaatgagggaactggccgcaagttggtgtatgaactgtatgcgccattgcaaccacaagctttttttaacgatgatttgttaagtgtggcattgttcgaagcggtccgcgaaacacggtttgtggaactccgtgactatttcaagctacgaccggtttacgccaaggattatcaagaggtcactaagaatttcttgaccgttttccatgtgcaaaacgatttattgacgaacgtgccaagcagtgtggctgaaactaaggcaatgtatcaacaaaaagcagctagcacaccgcagtttacctcggttgagttgcggacttttgattgggacctattacaagatgcaacggcgcaataccagattgatacggatcaaattctcaaaaatgaacagggcttgtttaatctccattatttctatggtctagatgagatggacttagcgcgtttgattggcttgacgatgaatgttgctgacagtacgattaatatggcagcgctcgaacagaacgtcttgaacaattacacacgacgtcagagtaaccggcaaacgccagctgctacaacaacgcaaaaaccgttagccgagttacaaaaagaatggcaaaaagccggctttaacgaacaggaattgcagtggctaacagaaagtcagggctacttgccagttgattatctcgaatacttgaaacaaaagaaccacggctttgtcgctaaaaatgaaatccgggcgttaaaggacttgcaaaaccgctatatctttaacaatgatgtgctcaatattttggtcgtttatatcattacgcaatatgatgggctcactcaggcgctagtcgatcggattgcgaaccagtgggctcaacaaggggttaagacggcagcggatgcgattttgcagattcgcgatttccaaaccaaacagacggcaaaggtgcaaaacaatcgccaaacgcgttatcagaacaaaactaaaaaagaaccagtacctaaatgggctaaaccagattatcaagcgccaaaagaaacaaccacacctgagcatcagcatgaactagaagcggcgttgaaaaaaattcgtgaggggcgggaatcgtaatggaaaatatgggtaaagatttgacggattacatgaatcggcaaaagttaaaccaacagtttaataaattggtcgaagatgccttgaacgattccgatgtccaagcatttatacaagctaacaaagaccgcttatcacaagaaacggtcacgcgtagtgccgctaaaatttacgaatacgtcatcgaaaagaagaagttagctaatgggcaaaccactttggcaccgggttatgcgccaaagttagtcttaaataaccattttatcgatgtcagttatgagcctacggtaagtttattacaagagcgcgaacaagctgccttgcatgcacgagtgaagtcaattaatatgccgcgcgatattgaacaggccaagattgattcatacgatccaaccaatcggtttgacgcattgatcaaagctaccgcgtttatcggggcttatcggcaagcaccccatgattttcaccaagccttgtaccttagcgggcaattcggggttggcaagacttacttgttaggtgcgattgcaaacgaactggcgttatccgggtttgaaaccacgttgattcatttcccgacatttgcagtggagatgaagaatgcaattgggcaaaacaatgtgttagaaaaggtcaacgtgataaaaaaagcaccgattctgatgattgatgatatcggtgctgatgcaatgagtgcgtgggttcgggatgaagtacttggcattattttgcaatatcgaatgcaagaacaactcgccaccttcttcagttcaaacttcacaatgactgaattagagacgcatttgacaactagcaaccaaggagacgaaccggttaaagcggcccgcatcatgcaacgtgtgcgctatttagcgcaagaaattgaagttggtggtcaaaatcgccgcttacaaccttagtaatttaggcttgctaaaaaagcaattaagtgttttaatagaatcaatcaatgatgaaagacaccttttaaatgaaccatcgcagagagaaaaacatagctgaaagtttttcacccccatttaattgaccactttcaaaggcaatacaactgatcgggtcgtttccgttatagacgcttaaagttggagaaccaaatgttggggtctcaatctgggtggaaccgcgaaattaattcgtccctgagctgcacaattcgtgcgtctcagggactttttttattgttgatgacaaattagaaggagtgaatagtaatggcagagattcaattaacttttccagatggtgctcaaaaggcatttgaacaagcaacaagtcttttagatgttgctaaatcaattagtacaagcttagctaaaaaggcaattgccggtaaattgaacggtgaattagttgatttacagcaaccaattttagaagatggggcaattgaaatcatcactaaagacgacaaagcaaccgatttgatggcaatttggaatacggcagcctttgttttagctgcaacgttgaaccgtgcttatcccgagatgcaattcggcgaagtacatgcaactgaagatggcttcttctatgataccgaaaacgaagctggtcaagtagctgtgaccgacttaccagacattaaaaaagcaatgagcaagttaatccaagctggcggggcaatcgaacgtgtcagcttagacaaagctgctgctaaaacactatttgctgggcaaacttacaaattagcattattagatgaaatggaaacagaccaagtcttagtttacaaattaggcgattttgctgattttgggttagcaccaatgctagctaaagtgagcgacgttaaggtctttgaactcttatcggttgccggcgcttattggcaaggtaaatcaagtaataagatgttacaacggatttacggaacagcttacaacaaacaagctgacttagatgctgacttacagcgtcgtcaagaagctaaagaacgtgatcaccgtgtgattgggaaccaattagacttattctttgttgatcctaaggttggtgcgggcttgccttattggttgccaaatggtgctaccatccgacgttcaatcgaacggtacatcattgataaagaagttgccaatggttatgaacatgtttacacaccaattctagcgaacttagatttgtacaaacaatcaggtcactgggatcactaccgtgaggacatgttcccaccaatggatatgggcgatggcgaaatgcttgaattacgcccaatgaactgcccatcacatatccaagtttacaaacaccacccacgttcatatcgtgaattaccaattcggttagctgaactagggatgatgcaccgctatgaaaaatcaggtgcgctttcagggttacaacgggtgcgtgaaatgactttaaatgatggacatacattcgttcgtcctgaccaaattcaagatgaattcaagtcaattttgaaattaatgattgaagtgtactcagacttcaatatcaacgattatacattccgtttgagctaccgcgatcctgctaataccgaaaagtactatgctgatgataaaatgtggaacaaagcacaaacgatgttaaaaggtgctatggatgatcttggtttagattacgttgaagctgaaggcgaagctgctttctacggtcctaagttggatgttcaaacgaagacagctatgggcaatgaagaaacactttcaacaatccaattagacttcatgttgccagaacggtttgaattacaatatgttggcgaagatggcgaaatgcaccgtccagttatgattcaccgtggtttagtatcaacgatggaacgtttcacagcttacttaacagaaatctacaagggcgctttcccaacatggttagcaccaactcaagctgtgattattcccgttaagaatgaattacattatgattatgcaaagaacgtcaaagatgcgatgatcaaacatggtttacgtgtgcgcattgatgatcgtaatgaaaagatgggttataagattcgtgaagcccaaacaagcaagattccttatacattagttgttggggatcaagaagttgctgacgcaacggtttctgtccgtaaatacggtgaagaaaacgctgctgaagaagcttcagacatgtttgtagatgcaatcgttgctgaagttggtaactacagtcgcgatggtaaagatcacaaaacaatcaacctataagcggttattaaaacgtccgaaatgttattttgacatttcggacgtttttttgtttttttaattgcgcacaactaaaaaagcggtataataaatatgtaaacgattccaatcgttgattaatgggaggcgttattatgacgatagaaaaatatcaagcaggttcagcagagcaaccattggacattattaacctctatgacttggaaaaagaagccggcgaagttgttcccaagggtggctttgggtatatttacagtggcgcgggtgatctttataccattaacgaaaatattacggcatttaatcacaaatacatcgcaccacgggttttacaagatatcgaaaatccagatacaactaccgaaatctttggcgatcacttaacatcaccaatcattatggcacctgttgcagctcataagttagtgaatactaaaggggaagcggcaaccgctaaaggtgtggctgattacggttcaatcttaaccatgagttcatttgcgtcagcaagtatcgatgatatggcaaccgcagcagatggcgcaccgcaatggttccaactctatatgagtaaggacaacgatatcaatcgtaagattttagatgaagcgatggcgcataacgttaaagcgattgtcttaacagctgatgccacagttggtggtaaccgcgaaaccgataaacgcaatcattttacattcccagtcgggttaccaatcgttgaagcttaccaaacaggtgtgggccaaacaatggatgccgtctacaaatcagctaaacaacgtttgaaccctaaagatgttgaattcatttctgaatacacacatttaccagtctttgttaaagggattcaaacagcagaagacgttgaaattgcacttcaagccggtgctaaagggatttgggtatccaaccacggtggtcgtcaattagacggtggccctgcagcctttgattcattacacgtcgttgctaaggcagttaataaacgggtaccaatcgtctttgatagtggtgtacgtcgtggtcaacacgtctttaaagcattggctgaaggggcagacatcgttgcaatcgggcgcccagtcatttacggattagcacttggcggtgcacaaggggtacaaagtgtctttaactacttgcaaaaagaattagaattagtcatgcaattagctggtacacacaacattgacgaagtaaaagccacgcacttagtggacaatcattacggcaactaagtacacgtaaatttaaatgcgggatttccttgactttaaattcctaaccgagtatacttattttcgttgagaaataaagcagaagttcccgcttctcgccttagtagacacttgatgtctctgggctgatagtttctaattcggacgaactaagtaaccgaacaagcgggcctttctgttatgagagggccgctttttttattacttagctgcattttctctctaaactttatggaggtgaagagtcatagcaaaagatttgatggttaacgatggtattcgtgcacgagaattgcgtttgattgctcaagatggcgaacaacttggtattaagagtactcaagatgcaattgcattagctgatcaagctaatatggatgttgttttggtttcaccaaacgcaaaaccacccgttgctcgtattatggactatggtaagtaccgtttcgagcttcaaaagaaacaacgtgacgctcgtaagaagcagaaaaccattaacctcaaagaggttcgtcttagtcccacaattgaacaaaatgattttaatactaagttgaacaatgcacgtaagttccttggcaaaggtgataaagtgaaagcttctattcgtttcaaggggcgcgcaattacgcataaagaaattgggcaacgtgtattggaaagacttgctaaagaaacagaggacatcgctaaagttacagcacgtcctaaaatggatggccgtagcatgttcttaatgttagaaccgctaaaggaccaaaaataaaaaatctgtttctgatttattaggaggaaatatcatgccaaaatttaagacacaccgtgcttcagcaaaacgttttaaacgtacaggtaatggcggcctaaaacgcagccacgcctacacaagtcaccgtttccacggcaagactaagaaacaacgtcgtcaattaagaaaatctggaatggtttcaaatagcgatatgagacgtatccgtcaaatgttatcaggccttaaataagccatagcattttcggattcaagcaaaaattagatcagtacagcaacgctttgacgttgtttgttattcaaggaggaaattcttatgccacgtgttaaaggtggaacagtgacgcgcaaacgtcgtaaaaagattttaaaattagccaagggttatcgcggcgctaaacatttattattcaaatcagcaaatactcaagtaatggtttcataccgttatgcattccgtgatcgtcgtcaacgtaaacgtgacttccgtaagttatggattgctcgtatcaatgctgctgctcgtatgaacaacatctcatacagccaattaatgcacggtttaagagtcgctgaaatcgacatgaaccgtaagatgttagctgacttagctgttaacgatgctgctgcatttacatcagttgttgaagctgctaaagctgcattaaacaaataattaaagatcaaaaaaagagtctgggacaaaacttcgttttgttctagactctttcttttatcattataaaattagtggctaataacaatcttacctggggcatgatgactctcaaggagcttgtggccttcaataatgccttccaaagtaaatgggagcgtcttgaagacggtattgtgtagtaaaccttgatcgatcaattcatttaaatcttgtaaggcggttaaatctgcataatccttacgcggatagacagattggtaattgatgtcagcgcgttgttgatcgtctgttggtaagatggtcgttgaagtgaatgtgccacctggtgcaactaagttattgaggcgttcagttgattctggatcgcgacttaagttgataccgattttagcggtctgcgcaagtcgttcgaagtcagatggctgatcataagcaattacttcttggacaccgaatgagcgcagatagtctaagttagcactattggcaattgcaatcacgtttaaatgagctgctaagcttaattgaacgagtaaactaccaacggcaccactggcacccataatagcgattgtatcgccgtgtttaaagtttgtgaagtgcatcagcgtattgtaagcagtgatgccggcactgggtaaaccggctgcttcagcgatactcatgctggctggcttacggagaatcttcgcagtactagccgttacgtattcgctataagcacccattgatcggtgattgatgacgatttcgccaacgcggtaatcatcgacgtcagcaccaagttcaacgatttcaccaaccacatctgtaccaggaaagattgggaagggtaatgggcgcactgaatcttgtgaaccattccgtagtgcaacatcgtatggattcaatccagcagcgagcactttaatgaggacttggttgtcctttggagttggttgaggctgatcgaaacgttcgaaaacgtcagggccgccaaagtgattaaaaccgaatttttccataacaaacacatcctctcaatttctttaaacgtaccagagttggggctaaaagtcgattagtttgacttatggatttaaatggattaggaattagttggaaattatggaaattaaccgcgtaaaggtgcaatttggtgtcaaataccctataattaatcagtgactagattaaaaagaagtgcgtcagtaggcggttatatttcgaggactagcctagtctggcgaatgaccaacttgttggtcgtttgacggacgtcgctagccgcagaaatatgcctactgaggcacgttagaaaagaagtgcgttcaaacctggtatactccgagcactagcctaacaaggcgaatggttgctgcaagcaatcgtttgacttgtgtcgctaggcacaggaatatggtttgaaaagcacgttaaagaaaagaagtgcgtcatccacggttagcttccgagcatttgcctaacttagcgaattggcgctgcaagcgccgatttgataagtgtagcaaagcgcaagaagctgttgatgaaagcacattaaagtcgaggggacagtacatgctaaagaatttcaagccaacttggatggtcaatgccatctacgacttaacaccagaacaacttaaggcaaaagggattaaggccgttttaacggatttagataatacgttaattgcgtggaataaccccgatggcacaccacagttaaaagcttggttagcacagatgcaagctgccgaaatcaccgtgatggttgtttcaaataacaaccatgatcgcgtgcaacgcgcgctcagtgaattgcaattaccattcattgctcgggcgaacaagccattggcaactgggattaccaaagcgaagaagcagcttggcctttcgcgacatgaagtggtgatggtcggcgatcaattgattaccgatatgcatgccggtaatgtggctggcgtccggacgatattggtcaaacccattattgacagtgatgcctggaatacatcgattaatcgattctttgaaaaatatattatgcaacaactactaaaaaaacacgcagatttaacttggcgggaggatttaaatgactgaaacacaacaaactgaggaagaactattttgtattggctgtggcgctcgcatccaaacaacggacaaagaagcactcggctatacgcctaattcagcgcttaaaaaaggcttggaaacgggtcaattgtattgccaacgttgttttagattacgacactacaacgaaatcagtgatatcaaattaaatgatgatgatttcttagccttattgaaccaaattggcgacagtgacgcgttgatcgtgaacgtcgtcgatatcttcgattttaacgggagtttaattccagggttacatcgttttatcggcgataaccccgtgattttagtggggaataaggttgatatcttaccatctgctcttaacccaaataaagtgatcaattggattcaaaaagaagcgaaagaacatggcttacatccggttgaaacgatgttggtcagtgctaaaaaagggaattcagttgatgaattattggccgtgattgaacgcgaacgtaaaggccgcgatgtctatgttgttggggtgacgaacgttggtaaatcaacgttgattaaccgcattatcaagcaaactgggattttagatagcgacgtgattacgacgtcacaattcccaggaacgactttagatcgcatcgatattccattgtatgaagatgatcatgcattgattgatacaccagggattatgcatgcccaacaaatggcgcattatttacatgataaagacttacggttgattgcgccgcaaaagcggattaaaccaaaagtataccaattaaatgaacaacaaacattgttcttgggtgggttagctcgttttgatttcattcaaggtgcacggcatggctttgtcggttattttgacaacgaactttacattcaccggactaaacttgaaaatgcagatcaattctacgctaagcaattaggggacatgctacagccaccacatccagaagatttagctgattttccagaactccaacggtatgaattctcaacaaagcaaaagagtgatttagtgtttgctgggttaggctggattacgttaccagaaaatgtcgtggttgcgggatatgcgcctaaaggtgtctcagtcatgattcggaaagcattaatttaattagggaaggaagtatcgcacgtgttaacaggcaaacaaaaacattacttacgcggtttagcgcaaaccactaaaccactttttcaactaggcaaaaacggcttaagccaaacttatttcgaacaaattgaagaggccatcgaaaaacgagaactcgttaagattaacttgttacaaacaacagaagtgaccgttgatgaattagccaacttcttaaaacaacatgacagtcgcatcgaaattgcgcaaaaaattggacgcacattggtgatttataaagcttcacggaaagaaaaataccaaaagatttcaacgattgttactaagctcggacgctaataaggcggtgatcagatgcaaagtgcaacgctaaagcagacaaatcatgtgactgaaccggacgtgttggttgtagaagatggccatcgcttgcaagtcggcattatggggggcacatttaacccgccacacatcggtcatttagtgatggcagaacaagttcgtagccaactcggtctcgataaaattttgtttatgccagatgccaatccaccgcacgttgatgagaaaaaaacattaccagcaaaacaccgtgttgcaatggtagaacgtgccatcgctgacaattcgcattttgaactcgatttaacggagattgaacgtggcggtgtcagttacacctacgatacgatcgtggcattaaaacaacaacaccctgaaatcgattattatttcatcattggcggtgatatggtcgactacttacctacttggtatcgaattgatgatttagtgcagttagtccaatttgttggtgttaaacgaacagggtatgctcaacaaacgccgtatccagtcttatgggtggacgcaccggtaattgatgtcagttcaacgcaaattcgcaataagattcaacaaggctgttcagtgcggtacttgttaccggacccagtctttgaatacattcaaaaagagggcctctatcatgagtgattttgtttatcaagaaaacatcgtgccgtatacacgggctgagttagtggctaaagttgccgctaacttatctgaaagccgatttgaacattgtttgcgtgtggaagccaccgcgattcaattagcacaaaaaaatggcgcagatgttgaacgcgcggcaattgctggtttagtgcatgactatgctaagcaattaccagatgaaacgttcattgaagcgattaaaacgcaaggctttgatccagaactactcaattacggtaatgccatctggcacggtgttgttggtgcttatttcattgaacgtgatttagaaatccatgatgaaacgattttaaatgctgtgcgtcgtcatacgattggtgcgccagaaatgaccttgattgatcagattttatttgtggcggattttgtcgaacctgggcgcaattttccgggcgcagaagctgctcgtgagacagcaatggctgatttagcagccggcgtgcggtatgaaatcttaaatacattgacctttttaattcagggcaagaagcagatttatccgaaaacaatcgacacatacaatgcttgggtaccgactcaagccaaataaaggagaactttagtgaaaagtttagatattttaaaaattgctgtgcaagcagctgatagcaaacgagcagaagacatcgtcgcaatgaacatggaaggcatcagtttattagctgattacttcgtgatgttaactgggacgtcagaacgtcaattaggcgcaattattgacgccattgaagacgcagaagaagaaaatggcgttttcgtaaaacacatcgaaggtaaaaagggttcacgttggatcttgatggactttggcgatatcgttgtcaatgccttcatgccagaagaacgtgccttatacaaccttgaaaaactttgggatcaagcaccacttgttgatgtttccgaatggttggatgaagaatgatttaccaaagctttgcaaccgtctatgaccgtttgatggaccattcattatatggtcaatggcgggattacacgttgcagacgttacaaaataaacatcgagtcctagaactagcttgtggggctggtgatttagccatcttgctaaaacaagcagggctagaggttgtcggcttagatttatcggccgagatgttgagtatcgcttctgaaaaggcttctgaagccgaggtcgagttacctttattacaaggcgacatgcttgacttaggcgaaattgggacgtttgaagcggtcacttgttttgacgactcgatctgttacatgccagatttagcgcatgtccaacaagtttttgaacaagtttatcgaactttagagccaggtggtcaatttctatttgatgcccattcactttatcaaatggatgagcttttcccaggttttatgtataacgataagacggcagaaacggccttcatgtggacgagttacgcaggtgaagtaccacattcagttgaacatgatctcagcttttttatctgggatgacgagattgacggttatcaagaacttaatgaattacaccatgaacgaacttatccggtggtagattatgttgcagcattagaagctgctgggttcaagaatgtatcagtcagtgctgattttggccaagaagccgttcaagaagatagtgtgcgttggttctttagcgcagtgaaataggcggaggacgcatgagaattacggggattattgcggaatataatccgctacataatggacatcggtatcaattgcaacaggcgcgggcagcttcgcacgcagatttagtgattgtctgcatgagcggtaactatgtgcaaagaggtgaacccgcgattttggacaaatggacgcgcgcacaacttgctttgagcaatggtgctgatatggtcgttgaattgccgtttgccagtgctgtccaacctgcagaccgttttgctgatggggccgtcaagttattggcggcgcttggttgtcagaccttagcgtttggcagtgaatatccaacgtttgactatcagcaagtcgggcaacagattttagctttaaaggccaagtcacagacgtttattgattatcaaaaaacttatgcgacgcagctcaatgagttttatcaagcagaattaaatttaaatttagatcaacccaatcacctcttaggggtcagttatgcggttgccaacgcgcaacttgaagtgccaatgcagttgcttgcgattaagcgtgagcaggcacaacacggcgatcaaacgattggcgcgggacaatttgctagtgccagtgctatccgacaggcggcaacaaagggtgatgactgggcacagttagccccagtgatgccgcattcgactttaacagcgctccagactcaatcgcatctggattgggaccaactatggccgctattgaaataccgaattgaaagtacaccccttgcccaacttcggcagatttatcagatgtcagagggcttggagtaccgtttcaaaaaggtgattcattcagtcaatcggtatgccgagttgttacaggcacttaaaacaaagcgatatacgtatgcacgcttgcaacgggtttgtttatacgtcctgttgaatattcaacaaacggatattgaacaatcattagcgcagcggcccatccatttgcttggctttaaccaagtcggccaggcgcatttgcacacgttgaaaaaaacgctcgatcacccacttatcagtaaggtctcagctaaattgggtgccgaagagggcccactgggattagaggtgcgagttgatcgattacaagaacagtttggctggcaatcacagaattttgcccgccaaccgatttttaaccaaagaaaggatgacgagcattgttaaaatggacagtccaatcattattaaaacatcgtgatcatccattgatgtttaaagaaacattgatgttaaaagaaagtttacaaaaaagagaagctgatgtcctagatgctacaccatttgtagtagacggtgaattaacggttgaccagcgcgctgtaattgcacgcgtacatgtggtcgggacattaacagtgccttcaacgcggagtttagatccagtagccttgccaatggattttgaattcactgaaatctacgttgattcagaagacgagcagttgggacgatttacggacgaagatattttgttcccaatcgaaggcgaagccctagagctacaggtagctgttgaagatcacattctcttgcacattccaagtcacatcctaacaccagaagaagaacaagatgatgtgatgccagccggacagtcgtggtcagtcatttctgaagaagcctatgctaagcaacaggctgaagaagaaacggcacccaatcctgaatttgctaagcttaaacaattattagaagaacaaaacaatgacgccgactaagtttggcgtttttttatacccaatttgttaaatggaccggaccaaatcagttaaaatgcttttatttaaagcgtaattctgctaacataaacacagtagacgcgttgtcgttttgatagtcaacaacgcttaaatttagaaatcatttaggaggccttttacatgagtcaaccacaaatcggtgtcatcgggatggcagttatgggcaagaacttagcattaaacattgaaagtcgcggttacaccgttgcgatttataaccgaacaggtgctaagacagaagcagtgatgcaagatcacagcgaaaagaaattggtaccaagctatacaattgaagaatttgttcaatcattagaaaaaccacggcgaatcatcttaatggttaaagccggcgctggtacagatgctgtcatcaacgaattgttacctttattagataaaggtgatattttaatcgatggcgggaacaccttctttggcgatacaattcgtcggaatgctgaactagataagtcaggcattaactttatcggaatgggtgtttctggtggtgaattaggcgcattagaaggcccttcaatgatgccaggcggtcaaaaagaagcttatgaattagttgcaccaatcttagaacaaatgtcagcaaaggctgaagatggccaaccatgtgtcacatacatcgggccaaacggtgctggtcactatgttaagatggtccacaacgggatcgaatatggtgatatggaactcatctcagaaagttataatttattgagaaacgttgttggtttatctgttgaagaaatcgctgatgtcttcaaagaatggaaccacggcgaattagacagttatttaatggaaatcacagcggacatcttaacgcgaaaagatgatttagaaacggataaaccaattgtcgacgtcatcttagatgctgctggtaacaaaggaactggtaagtggagttcacaaagcgcccttgaattgggtgtgccacaatcattgattacagaatctgtttatgcacgttatatttcagcaatgaaagacgaacgggtggctgcaagcaagattttaccagccccaaccgttgctaaattaacagaagataaaaaagaattaatcgaaaagattcgccaagcattgtacttcagcaagatcatgagctatgcgcaaggctttgaacaaatgcgggttgcttcagatcaatatgactggtcattaaactatggcgaaatcgctaagatctggcgtgaaggctgtatcattcgggcccgtttcttacaaaagattacggatgcctttgataaaaaagctgatttaaacaacttattgttggatgattacttcttagatattacaaagaattatcaaggcgctgttcgtgacgtagctgcaatggccatccaacaaggtgtgccagcacctggtttctcagctgctatcacatattttgattcatatcgttcagaagtattaccagcaaacttaatccaagcacaacgcgactactttggtgcgcacacataccaaagaacagaccgcgaaggcacattccattatacttggtataaagaacaatagagtgcgcaagtagacggggatgcgctgaggattagtggaatatcgtaaatgagcggtgaaaccgatcgtttgcggtatgcaactaaccggaagcggatgtctactggagcacgttttagtacaagagtgctgactattgcatttagtcattgagcattaataaaaaattgccattaatcccggttttaggattaatggcaattttagattaagcggaaatggctgcgacgggatgcgcgttttaaaatagagtgatgagtcgaacgtttttggctttaaggattaacagaaaaatgatgcttatggcggttcttagccataagcatcattttacggttaaccggaaaagacagttcgaggaagcacgtttctctaaacacccgagccgattattaaggcgcaggtgttttttcgattattactaaatcgccatcagatgagagtcagattagttagttatttaattggaactatgctagaatggaaaggtaagccgattttggcgcttgatgtttcttagagaattcttatcattgattagaatttagagagtccattaaaaattcttttttggggagtgactaaatgagtcgcatattgattattgaagatgagaaaaatttagctcgatttgtggaacttgaattaaagcatgagggttatgagacagaggtccatttcaatgggcgtactggtttagaagctgccttgaatgaagaatgggacgcgattttattagacttgatgttacctgaattaaacgggttagaagtctgccgtcgggtccgccaagttaagaatacgccaatcattatgatgacggctcgtgattcagtgattgaccgtgtttctgggttagatcatggcgcagacgattatatcgttaagccttttgccattgaagaattattagcgcgtttacgggcattgctacggcgaattgatatcgaaggcgaacataacgctgctaaacaaacgacggttacttaccgtgatttaacggttgaaaaagaaaaccgagttgttcggcgtggtgatgatgtgattgaactaacgaaacgtgaatatgaattattattaacattgatggaaaacgtcaacgttgttttggcacgcgatgtcttactcagcaaagtttggggttacgattcggatgttgaaaccaatgttgtcgatgtttatatccgttacttacgaaataaaattgatcgttctggcgaacaaagttacattcaaacggttcgtggaatgggttatgtgatgcgctcgtgatgcaggacgaaacggtagcatcaacaacaaataagggtcgtaaaatatcgttaaaggtgaaatgggcagctgcggttgggttggccatttttatcacctttgcgattttttcaattgtgatctttagtagtatctctaatatcttgctacacagagaagtcgacaatgtgcacgatacggtgaccgtcgtacaagcgagattgtccagcaatgggccacatcttacagaaggctttgtcaccaatcaattggatccgaaccgtcacagtcctaaagccatctatcaagatgcggttttaacgcggttagcacaacaggatgttacagttaagatttatgatgcaaacaagaagggtttgtttgcatcgcgcggggcgattggtccgtttccaaaaggcgatacggatacattaaagcgcaaagctatttttggtaagatgcggctgattggcattagtccgattaagacaagtcaaaaccgtgtaattggttatgtagaggtggtcaataacgtccgtgattataaccacgctatgactgaattaagaattgtgttagttgtggttgtcttttttgctatgttatttagtgcattgattggctatttattagccaaccaattcttgcgaccaatcgaagttatgaaaaaaacgatagaagccattaattcagagcctaattcagatgtccgaattcctgagactgggcatagtcaagatgaattatctgatctggtcagtgcgtttaatggtatgttgaatcgaattcagcattatttcgaacagcaagaccagttcgtcagtgatgtttcgcatgagttgcggacaccagttgcgattattgaagggcatctacaactgctcaatcgatgggggaaagatgatccagaggtactggaagaatctttagcggcttcgttacaagaaatcttgcggatgaaaaatttaattcaagaaatgcttgatttaacacgggcagataaagtcgtgactgaaggaacgactgaagtgaccgatgtcggggaagttgttcttcagaattaccataacttcgagatgttatatccagaatttaattttatgctcgacaatgatttgcaccaaccagcgctagtgcatgttaatcgaaatcacttagaacaaattatgattattctgttggataatgcgattaaatattcaacgatacgtaaagaagttcatattgccgtcgctagtgatgagcggtatgcgcaagtggccgtgcaagactttggtgaaggtatttcggaagaagataagaagaaagtctttcaccggttctatcgcgttgacaaagcacggagtcgggaaaaaggtggcaatggattgggattagcaattgcccaacaactcgttgaaggctatgacgggaatgtgtcgctagaaagtagcgttggctacggttctgtttttagagttgagttaccactgattcgtgaagtagaaccaaaatcagaagaaccagttaatacggattaaaaaagcggtgcgcttcaatcatctaattgattgaggcgcaccgcttttttttgttggttaagcttgtggcttatgccgttgcttacctgagttgcgtttgccagctactttaggtgtagcgacagttgggttgcttgtttctgttggtgtttctgtgacgtcggcagctggtttgactgctgctttttgagtgaacatttcttttgtgacaaccgtgacgattggtttttccttaatttcttgatcgatccgttttttaacacgaggcatgatgatgaatgtcgtgattaattgttgaatcaccatgataatcccaccggctaagaaataaagtgctaaaccggctggtgcaaataacgaaatgaagaatgtaatcgcaggactcattaggacggttgtttgcatttgtttcttttgttcagcaggcatcccgactaatgaaagtgcactttgaccgacatataagagggtcgcaatcacagtaatgataatgtttgggctcccaagaccgatcccaaagaagtggctacttgaaatttcaggtgagtattggatggcttgatacaaaccagagaagattggtaattgaattaataaggtcaaacaaccaagacttggcatcatgcttgaatcattttccttataaaccttcatcatcaactggctaagttcagccttttcttcaggggttgttgccgctttttgttgttcttggataatatctaattgcggtttcaagcgacgggtcttttcttgttgggccgtcatcttattcgattggttcaacattaatgggagtaaaatcatccgcacaacgaatgtgatgatgataattgcccagccgtaaccattgatgccaccgaaaacatcagcaatgcgttccataatatgttggagcggcacggcgatgtatttataggatgaaccatagattaagccggttgggactttgggatggctgctcattttttgtggaacacagccagcgagaaagaatgtaacggtcattgtaagcatcgcgagtgtcgcgaagcgtttagaatttttcataaatttagccctttcaagataagtttcaacaagtgtaactatacttgaaggggctaggtttttcaactgacaaccgaaaatttatgacacgctgacacattttcgagcggtgtttgaatgacacggtcgacgcgcccactaggggtgggagaagctttgacagcaccgataaatttttcgagtgcgtctgctgggcccatcgcaataattttaacggagccgtcgtcacgattggcaacggtacctgtgatatggagtttatcggcgaccaatttggtcatccagcgaaatccgacgccttgcacgcggccatagacttcaagttgaattgcattttgcattgtcatcacctcctcttcattgtaagctgttcaacccgatttggcgattaaaaagcgacccttgatagaatttacccactaagtcgcgtataatagaaagtactaaatagactggagcacaacatggaatacattcaatcgaatcaaaacactaaaattaaggcggctaagaaattaaccgttaagaaaaaccaacgtaaagaaaatacgtatctactagagggctggcatttagtccaagaagcaatccaaaataaggccgtcatccgccaagttttcgccactgaaaaatatgtggacgaacgcgcattgcgcggtctttacgatgaaacttttgaaattgcaccagaagtggcgcaacacttgagtgaaactaaagcaccccaaggcatttttgccgttgttgaaatgtctgaaacactggtaccagaaaaattaacgggtcgttacttattattagatgctgttcaagatcctggtaatatcggcacaatgattcggacagccgacgcagcagactttgccggcgttgttttaggcaatggcagtgttgacttgtataatccaaaactcttgcggtcaatgcaaggcagtcacttccatttaccaatttatcaaggtaacttgatggactggatgaagaaattcaattcgcaagacgtcccagtttatggaacggaattaaatccagaggccatcagttatcaagatgtgcctaaagcaaatgacatggccttgattctaggtaatgaagggaacggcgtgaatgaaaacgtcttagcagccacaacgcaaaatatttacatcccaattccagggaatgctgaatcattaaacgtggcagtcgcagctgggattttaatgttcaagttgattgaagcttaattcttaattttttctaacaaatgtaactttttaaggcgtttaacttcttttttgaacgaaaagctgttatccttgtggcagaatttgaatttaaaaaatgtcaggagtctttgaatgaattcaacagcaaaatggtacgatgacgcggattacatggctctaattgccgatttattagctaaagatgaagtccaaaaattagcgaactatacgcaacatcatcattcagatcgtttggaacattcgctaagcgtctcttatcgcagttatgaacttgccaagaagtggcatcttgatacgcgagcaattgcacgcgcgggcttattacatgatttattctattatgactggcgtgatacgaagttcgatttaggcacacatgcttatatccatccgcgcattgcgcttcggaatgccgaaaaattaacagaactctcacctaaagaaaaagacatcatcgttaaacacatgtggggcgcaactgttagtcgtccgaaatataaggaaagctacattgtatcgatagtcgatgattattgtgctgtgacggaattttgtacaccaatgtggacgaaatttaaacaaaaagttctccgccaaacaccggcaattaacaagtaaagatgcttcaagctgataggttgctttttgcagcctttttcagtacacttcttattaataagtgtgaggtgaaaataatggtgattgtaaaagaaaacgcaaatgctgactgtcaagaggccttccaactgtgtcctaaatttgaaaagactttttcaattctaggtaagaagtggaacggcctgattatcgatgtcctattagaaaacggggcacaacggtttaaaaacttagtgcacagtgtgcctaagtgcagtgatcgcgtattggttgaacgattgaaggaactagaacaagaaggcattgttgcgcggattaccagtgatgattctgcgttgattgaatatcgattgaccactaaaggtgaagaattagcgccagtaatggctgctattcacgattggtcaaacgactggtatgcgacagaagcctagttgctaattgcggttatttacgttaaaatacaattattaaacaaagacgaaaaagagtaacctaatcattagttttcagggagaataatcagttgactgcaagttattcaactatgtttaggtgaagttcactttctgagttgaccattggtccggtattgcccgttagcgcaaacttgagtgtatgactggaatggtcgtaaactagggtggtaccgcgaagcttcgtccctttttgagggacgggctttttttgttgaaaaaaataaggaggaattgcaatgtcattgaaggaacaattagaaaacttacagcaaaagagtctgcaagaaattcaaagagttgttgatttagaggcgttaaatcaaattcgagtggaagtgctcggtaaaaaaggaccgattacagaagttttacgcggcatgcgtgatttaagtaatgaagaacgacctaaggtgggggcatttgctaatgaaatcaagagtgatttggcagaagcaatcgaaacccggaaggcagaattagaagccaagaaggcagcagcccaactggctcacgaaacattagatgttacattacctggccaaccggtcaaaaaagggaccccgcatgtcttaactcaagtgattgatgatttagaagatttatttatcggaatgggttatcaagtcgttgctggctatgaagtggaagatgaaaaacataactttgaaatgttaaacatgccagctaatcatccagcccgtgatatgcaagatacgttctatattactaatgatttattgatgcgcacgcacatgtcacccaatgaagcacgtgacttggaaaaccatgactttgctaatggtcccattaagatgattagtcccggccgtgtttaccgccgtgatacagatgatgcaacgcattcgcatcaattctatcaaatggaaggccaagtgattgataaaaacattacaatggcagacttaaagggaaccttagaatacacgattcaccatatttttggtgaagaccgtgatttacgtttccggccaagttactttccattcacggaaccatctgttgaagtggatatttcttgtttccgttgtgatggtaaaggctgtaatgtctgcaagcaaactggctggattgaagttttaggggctgggatgacacatccgaacgtcttaaaagccggcggtgtcgactcagatgtctatggtggattcgcctttgggctcggggttgatcgctttgcaatgttgaaatatggtgtggatgatatccggaacttctacttaaatgacgttcgattcttaaatcaattcacacaggagggctagaccatgaaagtttcttacaactggttaaaagattatttagatttaacaactgccccagaggcattggctgaaaaaattacccgaacagggattgaagtggctgatgtcgcgcaaaagagcgcgggcttgaaaaaaattgtggtgggacatattttaagttgtgaaccccatccggattctgatcacttgaatgtttgccaagtggatgttggtgaagatgaacccttccaaattgtttgtggtgcacccaatgtcgctgctggccaatatgtagtcgttgcattacctaattctcggattgctgacaacgttaagattaaaaaaggcaagatgcgcggcgtggtttcaatggggatgatttgtggcttacaagaaattggctttgccgatagcgttgtgcctaaggaatatgttgatggcatctttgtcttcccagaagcaattgaacctgggacagaagtttatgaagctcttgggatgactgattacattctcgatcttgacctcaccgctaaccgagccgatacgcttggcatccacggtgtggcccatgaagtggccgccattgaatcattgacacctcattttgaagatatcgtagtgactgaaagcaacgttcaaacagctgatcaattgactgctcaagttgctgatgaacaattagcaccaagttatcacttgcgtatgttgcaaaacgtgaccgtccaaccaagtccaatgtggctacagacgcgtttatggaatgctggcattcgccccattaataaccttgttgatgtgacgaactacatgatgttaacgtatgggcaacctttacacgcgtttgatgcggatgctctaacgggtgatcacaaacaaatcgaagttcgtttagccaagacgggcgaaaaattaacgacccttgatgaaggcaaacatgacttaacaaatgaagatatcgtcattacagatggtcatcgaccaattgcgctagcaggggtcatgggtggtttgaactcacaaattactgctgatacgaaaaatgtgattatcgaagccgcagtttttgcaccaactgcagttcgtaaaacggctcaacgccataacttgcgttcagatgcgtcatcacggtttgaaaaaggcgtgaatgttgctgatgttcaaacagccttagatgctgctgctatgatgatggcagaccttggtaatgggcaagtgactgctggtacggttagcccaactaacttagtgccaactgacaaagtgattgaaatcgaagctgaccggattaatcgcgtcttaggcacagagattgcaacgcaaacaattgttgaattattagaacgatttggttttagtgtggtcaatactgataatcatttaacagtaacgattccaccacggcgttgggatattgaaatccaagcggatatcattgaagaagtcgctcgtttatacggttacgataacttaccaagcacattgccaactggcgatatgacaaccggggcattaacgactgaacaaaaggcactccgtaaaacccggcatacacttgaaggtgctggtttaacgcaagcaattagttatgcattaacgacccctgaaaaagcgcgtcaatttacgcttgttgattcggcgctgacagcacttgattggccaatgacgcaagatcatgcgcacttacgcatgaacttgattactggtttattggacgatgctgcttacaatgtggcacgtaaacaaactgatcttgcactatacgaacaaggacgggtatttttaaaacaagcagacgaccaagttcggccaacagaaattgaatatgtggctggcttaatgagtggcaatcgccaaatgaagacttggcaagctgccgcagcaccagttgatttctacacaatcaaaggtgtggttgaaatgttgatggcaagttacaacttagcggatgcaatcagttatcaaccaacacaagcttatccagaaatgcatcctggccgaacggcagccatttacgttggtgaacaactggttggatttgttggtcaaattcatccagcagttgcgaaagctaatcatttaaaagaaacttatgttttccaattagatttagcacaaatcctagccttgccaacccaaacagtgattgctaaaccagcacctaaattccctgaagtaacgcgggatattgcaattcaggtgtctgatcaagtttcaaatgccgcaattgttgaagccatcaaagcaaagggtggcgcccacttagtttcagttgaacttttcgatgtttacgcagggagtcatattgaggctggtgagaagtcaatggcttacaccttaacgtacctcaatgaggtagctactttaacagaagaagaagttaacgctgcttttgaaaaagtagtcgctgaattagttgctacttttgatgccaaaatccgttaatctcgaatctttaatgcaatttttgaataatttggtataatgttttaaggattgtatttaaaagagcaattaggaggtcatcctttgaagaaagttgatcaaaaggagccagtaaatcaagaaaaagcggcacaatcattgtacgaagaacgccgtgcagaaaaaaaagcagcaaataaaattgtctattggattatcggtattctgttagcgcttgttgtcattattggattcatgggatatcgctacgtacaagcatctcttaaaccatacgacaccaaagcaaaacaagaaattaccgtgcgcattcccaacggctcaacgaataaacaaatcgctgctattttgcaggataaaaaattaattcgaagcgcgccagtctttaattattatgtgaagactcataatttctcggatttccaagccggttatcatgtgttgaaacaatcaatggggttagataagatcatctctaacttacaaaaagaaggcacaccaacccgtcctcgcgatgtgaagggcaaattgttagttaaagaaggggtcactttagaagaaattgcggccgaagttggtaaacaaacaaaattctctaaagcagccttcatcaaacaagcgaatgataagcaattcttagcaagtttagagaagaaataccctgcattattgtcatcaacaatggctcaaaaggatgtccgctatcacttagaagggtaccttttcccagccacttacgaagtttataaagatagtacattaaaagaaattatcaccgaaatggtttcaacgatggatcaaaagatgcaaccttattatgcaaccattaaggataagaagttaaccgttcaacaaacgttaacgctagcttcattggttgaacgtgaaggggtcacagccgtcgatcgccaaaagattgccggtgtcttctttaaccgtttagacatcgatatgccaattcaatctgatatttcagtaatgtatgcattaaatacccacaagacacacctttataacaaagatactaaagtcgattcaccatataacttatatatcaataaaggttatggcccaggaccgtttaactcacctagtttacagtctgtcacagccgtcttgaatccagctgatcgtgatcaaaattatctctactttgttgctaacttgaagacaggtaaagtatattactcaagaaccttcgaacaacataacgatacaacagattcgattgaagattaggttcatttaggattatcgaagtcgaccgccattggaggtcgacttctgtttacccaaaaagaagttgagaataaaaggagcgtcccatgtccagtcaaaaaaaagcacccatcattatcggcgttacaggcgggtccggtagcgggaaaacaaccgttagccaggctatcgcccaaaaatttgcgaatcactcagtgatgttattaccacaagatgcgtattacaaacggcaagatgttccgtttgaacaacgccaacaaacgaattatgatcatccagatgcttttgacaacgatttattaatcgaacaagcatcaatgttaaaaaatcatcaagccattgaacaaccggtctatgattataaaattcataatcggacggaggaaattcaacgggttgaaccgcaagatgttattatcttggaggggattcttgtattggctgatgcccggttacgggatttgatggatattaaggtttatgtggatactgatgatgatattcggttattaagacggatgcatcgcgatatggaaagccgtggtcgaacgtttgatgatgtggttggccaatatcttaagacggtaaaacccatgttccatgaattcattgaaccaaccaagcgttatgctgatttaattgtcccagaaggtggcaataatcgcgtggccattgatttacttgtaacaaagattcaatcaatcctaaatgccgattaaagattgagatttgacaaggacgtacacagtaattaagatagtcagtattattaattaaaataaagaggtggataaaatggtacaaaaaacttatccaatgactgcagaaggcaaagaaaagttagccgaagaactagaaacactcaaaatggtaaaacgaccagaagtcattgaccggattaaaattgcacggagctttggtgatttatcagaaaactctgaatatgaatcagctaaagatgaacaaagctcattggaaacacgcatcgcagaagttgagaatatgttacgctttgcagaagtaatcgatgttgatagcatcgcagctgatgaaattgctgttggtaaaacagttagctttacagacgacgaagatggtgaagaagaaacttaccaaatcgttggtgctgcagaatcagacccattcagtggtaaaatttcaaatgattcaccaattgcccaagcattacttggcaaacacgttggtgataaagtagctgtgcaaacaccaggcggcgacatgcacgtcacaattacagaagttaaataaagtgcgtttcgaacgggttagtctttgaggattaacgtaaaaacgggtgttatggtcgaattttgaccatgacgcccgttttgtagttaaccggaaaaggttgttcgaaaaagcacgtttaagaatagagtgcttttgggtgcggttagcaactgagcattaatacaaaattggcagtcatccagattttaggatgactgccaattttagattaagcagaagttgttgcagccaaaaagcacgtttcaaaaaagccacggaaatcaatcccgtggcttttttattttgccgttaattcgttaatcagccttgagacggattggtgtttatctggtttgcttgtataataatattaatcagttgaaaggggaccgtaaatatgccgtttatctggcgcgtttttttaataatagaagcgattatcttcgggacgttcatttggcagatgattacgatacccgcaaatttagtgttcatcattgcaggtattttactcttagtctgggccaacaaacgtcgtagtaaaggtaaaatcggtgtctggacgactttgttaacgatggtcggttgcgtagctgttacggtaccactgttaattaatttctcgttatggttaatgattattgttgcggtcgtctttttagccttaaatcatagccgaatgggacagtttagcagccgcaatatgaatcagttgtttgataatgccccttggcgcaagaaaaaatttattcccgttaatacgacggaacccaccgcgaaaaagacaacagtcaagcggcatagttggtttggtcatcagacaattggcaataacatttttgaatgggatgatattaacttcgcggtcgctgccggtgatacaattatcgatttagggagcaccattttacccaagaatgacaaccatattgtcatccgtaaggggtttggaaagacacggattttagtgcctgtcgggaccggtgtctatcttgatcactctgcaatgttagggagtgtgacaatcgacaatcagcactataatttgaaaaatgagtcgattcagttgtatagtacaaactatgatgaagaaagtcgccaccttaaaatcattaccaacgtaatgattggtgatcttgaggtgatcttagtatgagcaagttaacgcggagctttatatggatcagcacgagtttgttgacgcttctgttttcagtggcgttattttttgcgtatttctacagtacgcatcaggaacaatggctgattagtttggccacgaagcaattattctatgtaccactgattgtttatattgtggtggccgcaatggcagtaggctttttagttaccgcaatcgtctatcttgtcgtacgtaagcaattatcccatactgaaagccagttacaatttttactttctggacagtatgaatcgcctgtttttcagattagacagagcgaaaccaatgactacgcgatgtcaatcgagcaaacagttgaacaattacgccaaaaaatgatacgcttacaacaagagattcaaagttatagtgatcggccgaccgtgattgctggtgaaaccaaggaagaaattctagcgcaagaacggcatcgtttagcacgcgagttacatgattcagtgagtcagcaactatttgcggcgacgatgatgttgtcggcactcagtgaagttgcgcaaaaacaagctgataacgcgcagatgttgcagtccttaacgacagttgaacgggtgttaaatgaggctcaatcagaaatgcgggccttactcttgcatctacgaccagttaatttggaaggcaagagtttacgcgatgggatcattcagttattgaacgaattgaagaccaaaattgcgattcagattacatgggacattgatagcataacgttaccaagtggcatcgaagataatttatttagaattgtccaagagttgctgtcaaacacactacggcatgcgaaggcccaagagattgaagtatacttgaaacaactcggtcagagtgttttactaaaggtaattgatgacgggaccgggtttgatacgaatgctgagcaaaaagccggcagttatgggttaaacaacattgtcgaacgggcccatagtgttggagggacggcaaaaattattagtttgcctaaccagggaacgagtgttgaaattcgagtgccactattaaaggagaccaattaagtgattaatgtattgatagtagacgaccatgaaatggtgcgattaggcatctcaacgtatttaggggttcaagacgatattcatgtcgtcgatcaagccgtcaatggtaaagaaggtgtcgaaaaggcgcttgcattacgtcctgatgcgattttaatggacttagtgatgcctgagatggatggcattgaggccaccaaaacgattttaaaggcgtggcctgaagccaaaatcattatcttaacgagttttatcgatgatgagaaagtttatccggcgattgaagccggtgcggccagttacatattaaaaacttctacagccgaggaaattgccaatacgattcgtaaaacggcgcaaggacaatcggttttagagccagaagtgacgaataagatgatgaatcgcttaacacatccggctgaacctaagctatatgaagacttaactaatcgcgaacgtgaagtcttaggcttgattgccaaaggccgtagtaatcaagagattgcggatgaattattcattacgttaaaaacggtcaagacgcacgtttcaaatattttggcgaagttacaagtggatgatcgcacccaagcggcaatttatgcgattaagaaccaactagtcgattaatcaggaggagttcaacatgcaaattcaggtgtcagatgcagcaagtcaatggtttcgcgacgaattagccttacaatcgggggatgcagtccgcttttttggcaaagtgtatggtcaaacggccgtgcatgatggcttttcattgggcatggaacgcgctactgttgagcagccaattggttcggttgttaaagatggtatcacctattttgcgagtcaatcggacgaatggttttttgccgattatgatttacaggttgattacgatccagagcttgaagaacctaagtatcaatttgaacgtcgttagacgataaaaagccccgccaaatcatttagcggggctttttattttgggttaaaaggcgaccagtacgcgcccagttttatgcgtcttttggctaagttctcgggctaaatcagaaaaggcgaccaagttaactgttggccaaatttccggtttaaacgtcgtggcgagtaattgccagagttctttacggtctttgcgcgggtaatagactgaatcaattccggctaaggtaatcccacgtagaataaacggcatcaccgttgtttctagggttgcaccagcggcattgccacaagttgctacgaatccgccggcacaaacttgcggtaagatgtgggctaaaacaggaccgccaagcgtatcaataaccccggtgaatgtctgatggctgagcgctttaagcggaccagcagttaggtcagctgtattaataacatgggtcgcaccaaggtgcaataaataatcggtttgttgcaagtcacgcgtagttgcggttagatttgtgaagccaagctgcgcgaggatggtaagtgcgaaacttccgactccgccagtggcacccgtaattaagagtggggtgtcatgatcggctgtaaaggcttggcgtaataatttgctgagcgcaattgcggcggtgaaaccggccgtcccaaactgcatcgtttcagcaagactaagattttcgggcaacttaaagagccattcactagggactttgacatattcagcgtagcccccagcgattgtaatgccagtttcataacccgtacataacacctgatcgcccgcttcaaagaacggattatccgattcgacaacttcgccagcaaaatcaacgccaggtgtcatggggtagtgacgtaagacgccacttttaggattcatagcgagccggtctttgtagttaatatcagaataggcgactttgactaacaccccgtctttagcgaggtctggcgttaacttagtttgataagtggcactgacagtagtatcggtttgttctaaaacgagtgcttgataggcgaccatatgattacaacctcatttctaaataattatttaacttcattatacaacaatgttcgctttgaattggcattgcgtctcggaaacggtataattaataggatattagtcaactaataacgagtctgagagtgctaaagataaaggggacgaagaagaagatgcaacaaccaatggtggaatttaaaaatgtcattaaagaatacgacgatgtccaaattttaaagggcatcgacattgcgttggaaaaaggtaagttttataccttacttgggccgtctggctgtggtaagacaactattttaagaattatcgccggatttaccaatgcgtctgccggggatgttttatttgaagggcagaagatgaacgatttaccggccaataagcgccaagtcaatacggtttttcaagattatgccttgtttccccatctaaatgtctttgagaatgttgcatttgggttaaatctacgtaaagttaaaaaagcagcgattaaagaaaaagtgattgaagcccttaaattggtgcgccttgccggatatgagaatcgcgaaattagtgagttatcaggtgggcaacaacaacgagtagcgattgcgcgcgctttggccaatgaaccaaaagtcttgctactagatgaacctctatcagcactcgatatgaaattacgaaaagatatgcaatatgaactacgcgatttacaacaacgattagggattacgttcttatttgtaacgcatgatcaagaagaagccttagcgatgagtgatgaaatttttgttatgaacgaagggcgcgtgttgcaaagtgggacacctgtcgacatttatgacgaaccgatcaaccatttcgtagccgattttatcggggaaagtaacattctgccaggtaaaatggttgctgattatcaagttgaaatggtcggcaagcagttcgaatgtgccgatgccgggatgcgggtcaacgaagcagttgaagtggtgcttcgtcctgaagatctagacattgttgccgttgaccaaggccaattagtggtaacggttgatacgcagctatttcgtggtgactattatgaaattacggcctatgatgcggatcaaaaccggtggttgattcattcaactaacccagctaaagatggtcaacgagtcggcttattctttgaaccagaagacgtgcacatcatgcgttttggggaatcagaagaagatttcgatgcacgacttgaaagttacgaagaggaggactaaggcaattgcgtaaaaaacaatggttatattacttaccatatgccctctggctaattttgttcgtcctcgcaccagtcgcattgattgtgtaccagtccttctttgatatcaatgggcatgcgacattggtcaactacacgacctatttccagtcaggcacttacttgaagatgacattaaattcgttatggtacgcctttttaattacgctgattacgctattaatcagttatccgacggcgtattggcttcatcaaacgaaacataaacaactttggctattattaattattttaccgacatggattaacttattactgaaagcttatgcgtttatcgggatttttagtcaagatggtgccattaatcattttttggggtggttcgggattgggccacaacagattttatttacgaatttcagtttcttagtggtggcgacctatattgaaattccgtttatgattttgccgatatttaatagtttagaagaattgaatccatcattggtcaatgcaagtcgtgatcttggcgcaagtaattggcaaacctttacgaaagtcatcttaccgttaacaatggctggggttaaagccgggatacaggccatctttattccatcgttatccttattcatgttgacgcgtctaatcgggggtaaccgcgtgattacgctggggactgcgattgaagaacacttcctcacaacaatgaactggggaatgggctcgaccatcggggtggtcttaatcgtcgccatgggcttaatcatgctggtaaccggggagcaaaaagcaaagaagaaggtgactaacaaatgaaaaaaatgaaatggcaaaacgtttggttagtgcttgtctctgtcttattgtacgcaccgattttctatttgattttctattcatttagcagtggggataatatgaatggcttcaaggcatttacctgggcaaattatcaggccttgtttgaagatactcggatgattgaaattgtgttacaaacgttattaatcgcgattctatcatctttatgtgcgacgattgtggggacgtttggggcgttagggatttattcaacgaagcaacggcgtgtgcgcaatatgattttatcgctgaacaatattttaatggtttcacccgatgtcattatcggggcaagttttttaattttcttcacgttcttaggttttggtttgggctttggttcagttttactgagccatatcgctttttcaattccgattgttgtcttgatggttttgccgaagttaaatgaaatgcggccagcattagttgatgcggcacgtgatttaggtgcgactgactggcaagtcctgagtaaagttattttaccgtacattagttccggcatttttgcaggctttttcatggcgttcacctattcgctagatgattttgccgtgaccttctttgtcactgggaacgggtttgaaacgctctccgttgaaatttactccagagcgcgtcaaggaattagtctagaaatcaacgcattatctgccttgatgtttgtcttctccttaatccttgtggccggctactatttattgaatcaaagaagccaagcccaaaaagcacggcgtaaacggaaagcgggggcttaaaatgaataaattaggacgcatcactttagcgattttagtggtctgtgcagccctttggtttgggacggttgaattacaaaaatcacaaggttatacgaaaaataatacattaacattatataactggggcgattatatcgacccagcacttattaaaaagtttgaaaagcaaactggttatcacgtttcggttgagacgtttgatagcaacgaagcgatgtacacgaagattaagcagggtgggactgcttacgatttagcggtgccaagtgagtacatgattgaaaagatgcgcaaagcacacttacttaaaccgattgatcatcgtcgcttaaccggctatcaaaatattggcaaggattttttgaatcaatcatttgatcctgggaataagtattcattgccttatttctggggcacactcgggattatctacaacgatcaattggttaaaaaaccactgacacattggtcagatctatggtcaccagattatcgcggccaaattatggtagtcgatagtgctcgggatatgatggccgtgggcttgatcgaaaatggccagtcagtcaatagcacgaatccggcggttttaaaggcggctaaggacaagcttgatcagatggcaccaaatgtcaaagcgattgtagctgacgaaattaagatgtatatggttcaaaatgaagcgagtgttgctgtgacttggtccggtgaagctgccgagatgttggataataatccccatttgcactatgtaattccagaagatggcagcaatctatggtttgataatctagtgattcccaagacggcaaaacatgaaaaggcggcctatgccttcttaaactttatgttagagcccaaaaacgcggctcaaaatgctgaatatattggttattcaacgcccaatataccggccaaagcactcttgccagcagcaacacggaataacccaggctattatccaagtcaaaaggtgatcgatcgcttgcaagtttatagtgatttatcaccaactgcggttggccgttataatgatttatttttagagtttaaaatgcaacattaaaagtacaatgagcagattgaaatggttcatggtataatagatacagaatttttttggatggaggttacctatgtcatttgaatggtcacagttattaacgtggcggatgctcgcaaatgtgctagacatcatcgttgtctggtattttgtgtataaattaatcatgttgattcgcggtaccaaagccgtccaattgtttaaaggtattatagtcattgcgctgattaaggttatcagttggtacattggtctacgaactgtttcgtacattatggatcaatttatcagctggattgtgattgcgttgatcgttatttttcaacccgaaattagacgtggtttggaacatatcggacgtggatcgctactacgacgcggcgttaatcccaagattgaacaagaaaataatttaattaaagccctcgataagtcgattcagtatatgtcgaaacggcgtatcggggcgctgattacaattcaaatgaataccggtttggaagattatatcgaaactgggattgatttggatgcggatgtgacgggggagttattaattaacatctttatcccgaatacaccattgcatgatggggcggtcataattcgcgatgataagattgccgttgcggccgcttatctaccactttcagagagtaatttaattcccaaagaattagggaccagacatcgggcagccgttgggattagtgaagtaacggatgctttgacgattgttgtttctgaagaaaccggtggtgtcacattaacgcgcaataacgagttaatgcgtgatttaagccgtgatgattatatgaagtacttcaactcgcatttgattacccaagaggaaaacaaaacgagtctcttacaagaatttgttgatggcttcaaaaaaggaggccagaaatgatgaaaaagtttgttgaaggcccatggctctatcgaattttagcgttatttctagcgttgttactgtttggttatgtcaatttggatgaaattaacacgacgcgccagacgaataacaatgatacacagatgctagcaacccgcacggaaaccgtaaaagtgccgctccagattaatgcggatactgatcggtatttcattaccggctatccacaaaaggtcaaagtgaaattatccgggccgaatgcgctagtcacatcagcagttaacacattaaatttccgcgtgattggcgatttaacgaagctgggtcctggtgatcacaccgtcaagttaaaacagacggggattaataaagatatcaaagtcacgattgaacctaaagaaattaaggtccacattgagcacaaagtgacaaagcaattccctgtgcaggtcaatgttaagaaagaaaacttagcggccgggtatagtctaggaaatccaaaactaagtcaagacgtggttgaagtcagtggtgcaaaatcagcagtgaatgctgtgtcgcaagtagtagccactgttgatcccgatgaaggcaccaaaaaagacatcaatgaagaagtcttgttgcaagctgttgatcgcaatgggaaagcgttaaatgttttaatttcaccacaaaccgttaacgttaagatattggttcaaatgagtaagaaaacactcccgattagtttggaaaagaccggtgaaaaaagtggctacagctacagtctgtcatcaacaactgattcagtgaccgtgtatggtcgtcaaacagctttagccaagttgacgtcgttaccagtgagtgtcgatttatcgtcaatcacgagttcaacttcaaagacggttaaagtggctttaccagacaacatttatgagagtacgccaagtgccattaaggtgacaattacggtgactccagatacgaccaatacgagtgctactaatactgttgaagcgccgtctgaaagtacggcacaaacatcaagtagtgcgcccgttgagtcaagttcaagtaacagccaatcaagtagtcaatcaagctcaagtgaaagtagtaaagcaaataccgatgtaaatcaataatcaacgctaaagattttagcaggatgaatggagataattaaatatgacaaagtattttggaactgatggtgtacgtggcgttgccaacttagaattaagcccagaaatggcttttaaattaggacgtgcgggtggttacgttttgaccaagcacgctgataaggatcaacggccaaaggttttggtggctcgtgacacacgtatttcaggccaaatgttagaacaatctttgatttccggcttattatcagttgggattgaagtcttatcattaggcgtggtgacaacacctgcggttgcctatttaattaaggttcaagaagcaagtgccggcattatgatttcagcctcacataaccccgctatctataatgggattaaattcttcggcgcagatggttacaaattaccagacgcaactgaagaagaaattgaagcaattattgatgccgaagaagatactttaccacgtccagaaggcgctggtctggggacggtggaagaatatccagaaggtgctttgaagtatacccaattcttagaacacacgattcctgatgatttagctgggattaaagtggcattggatggcgcaaacggttcaaccagtggtttaattagccgcgtatttgctgatctagaaacagaatttacaacaacggcaacccatccagatggtttgaatatcaacgatggtgtcggttcaacacacccagaaaatgttgctaaaagagtgcttgaaacaggcgcgcaggttggactagcatttgatggtgacggggatcggtgtatcgcagttgacgaattaggtaatattattgatggggacaagattatgttcattctcggtcaatatttatctgataagggtcgtttaaaacaagatacgattgtcacaactgttatgagtaatatcggcttgtataaagcgattgaagccaacaacatgcaatcagtccaaacagacgttggggatcgtcacgtcgttgaagaaatgcgtgaaaaaggctataaccttggtggcgaacaatcaggacacatcatcatctttgattaccacaatacaggtgatgggatgttaaccgggattcaactcttaaacgtcatgaaacaaactggtaagaagttatctgaattagcagcccctgttcaaacttacccacaaaaactcgttaacttaacagttaaggacaaggatgcttggttaacaaatgacaagatccaagctgccattgataccgttgaaaaagaaatgaatggtgatggccgcgtcttggttcgtccaagtgggacagaaccattgctacgagtaatgtgtgaagctgcaacagaagaaaaagtaaatcaatatgctgatcaaatcgcagcggttgttaaagctgaaattggcgcataattaaagggagtgctgacgcgagttggttaggctttgaggattaacagtaaaatgggggttatggtgtttcttgccataatccccattttgcagttcaccggaaatgactactcgagaagcgcgttcaagttggtcaacttttgagcactagcttgaaaagcacgttctcacttgaatcaaactaaaaaagcccgtcaacattgtgttgacgggtttttttggtgcaattttatttaagagcccattcttctaacgcaatgtgacttgttcgtacatcagaaaaccaaagacaaccaataagacaacagcagcggatatcagataccattctttgacaagtatgataggtgcatcagtcaaatgataatttttgcggtaacgtttgagattgaaaacactgacttcattcacgatgattaataaagcgggttctaatagtagcatgtatttactaccggttgaatcgacaatgttattggcggcaatatgtaaggcgattgttttaggtgcaacgacgataaagctcagtccgactaataggccaagaagagaaatacttcgaattaacaagatgctctttttcattacagaaactccttttctaaaattgactggccttagtatagcataaaagcgctagatagcggaaaatatttggactataccaaaattataaatttatatataccaataaaaatgttgacattaaaatcgttggtgctattatatttaagtgttgtaccaattgattaaagaatattaaaccaaagttgaaaagaggatttttataatgtgtggaatcgtaggcgtaattggcaatgaaaagacaactgaaattttattaaacggattagagaagttggcgtatcgtggttacgattcagcgggcatttacgtgaacagcgaaactgggcatgactacttagttaaagaacccggtaaaattagcgttctagaagcagcggttgggcctgaagtacaaggaacaatcggtgttggtcatacgcgttgggcaacgcatggtgttgcgagtcgtgataatgcgcatccgcatgtttctgaagatggtcgtttttacttggttcacaacggcgtgttaactaactatttagctttaaaagaaacatacttggaggatgtccattttgtcagtcaaaccgatacggaagtcgctgttcagttgattgcttaccttgctaagacagaacaattatcagctaaggaagccttccggaaggctttaacgttgattgaaggctcatacgcatttgtcatggtcgatcgtgatgatcctgacaccttatacgttgctaagaataaatcgccattgttaatcggtgtaggtgatggctttaacgttgtgtgctcggatgcattagcgatgttgaatgaaacaaaagattttattgaaatccatgatcgtgaaatggtgacactcacgaaacaaagtgttcaaattgaagatttagacggcacttttattcaccgcgaaagctaccatgttgaaatggatgctgatgcagtgggcaagggcacatacccacactacatgttaaaagaaatcgacgaacaaccagctgttatgcggcgtttattgaacgaatacgttgctgttgatggagagcttaaaatcgactcagcgttactcagtgcaatgaatgatgcagatcgcctctacatcgtggcggctgggacaagttatcatgccggtttaatcgggaagaccttgtttgaaacattaacgcacaagcctgtcgaagtacatgttgctagtgaattcggctatcacatgccgctattatctgaaaagccattctttatctttttaacacaaagtggcgaaactgctgatagtcgccaagtgttggtacaaactaatgtcttgcattatccaagcttaaccatcactaacagccaagggtcaacactttcacgggaagctgattatacattattattgcatgcaggccccgaaattgcggttgcttcaacgaaagcctacactgcacaaattgcagttgaattattcttagctgttgcactcggacgccacaatcaactggtgctagcagaacaattcgatgtacatcatgaattaggcttagtcgctgctggcatggaagctttattgagcgaaaaagaacagattgaaaccttgacgactgattacttacaaacaacacgcaatgccttttatattggtcgtggtgaagattacgccttgagtttagaagctgctttgaagttaaaagaaatttcatacatccaagctgaaggatttgcagccggcgaattaaaacatggcaccatcgctttgattgaagaggggacacccgttattgcattcttgatggatgctaaaacgattgcgcacacgcgtggtaacttacaagaagtgactgcgcgtggggcaaaagccttgacgattgtcagcgaagaatctgctgaagcagatgatcagatcattttaccaaccgtaaacgacttattgacaccattattggggatcattcctggtcaattaattgcttactatgcaagtttgcatagagggtatgatgtagatcagccaagaaacctagctaagagtgtcacggttgaataaataatattcaaaaagcctcgttcaaagaacgaggctttttttgcgtttaatgagttggtgcatatgttgctcgaggaccgccaacgtattttggtcgtgaccgtaaagctgtgacatgtgcactacccaatgtatcaagggttgggcggacagggacttgaacgaatttcacgtgcatcccaatcgccgtatcaccgatatctaatccagcttgtgcaacgatatgttcaacttcaaccggatcactgaattgttcaaatgcagcgacggagcaggcgcctccagcgtgcatagcaggaacaactgagacaatttcaaagtcgtgtgcgcgggcaacctgacgttcaatcaccaaactacggttaatatgttcacagccttgcacggctaaatgaatccccaatggattgagaatgccacgaagtgttgcgatgatgacttcaccgacttctttgctagaagccttaccgatatgaccaccgacgacttcactcgttgaacacccgaggacgaacaaatcaccatttcctaagtgtgcttcgtttagaacatcctgagtcatctttgttaagtcttgttgaatttggtttaattgtaattcgtttgtcatttaaaaaatctcctagtggttaaataattgtggtcgaatacgggataaactagtgactaacgggatggtaaccacgataccaagtccattttgaacaatattactgaaaatcgaagcgattccggcagcccagccgaaaagtaaactggtagctaaaaagtaaccggcaaccatgacgatactaccgcaaatgagggggataatcagctgctttggtcgcattgaatcattacgagtcaggtgacctacaacgaagccttgccccccatgaatgatgagtgagaagagacaccactcagggtaaccagataatagatcgattaataggccactcagggctccgacagtgagtccgccaggatttcgcagcatgatcgccgttgtataaataccgacctcacagagcgtcacaaagcccttcgtcgccggaatcgggatgatgattaacaaagagagtgccacggtcaatgcggtgagcatcgcgagtaatggtaattgacgtttattaaagtgcatgtttagtagccccctgccagacattccccaggccatggcgtagatgaataccatcttttaaaccggcataaacaaatttctttgcgcgtgccacggcaacttcaatcgattttccttgtgctaattccgccgcaatcgctgccgaaagcgtacaaccggcgccatcaatggtagttgtttccaatcgtggagcttctaaataatgagttgttgcgcccgattttaataaatcaacggcctgctcaccagggaatcgttgaccacctttgataatgacgtgcttggggccaaatgattggataattgtagcagcttcgaccatttcctcacgcgtggtaattgacgaaagaccactgagttgttgggcctccaacaagtttggggtgacaacgctcgtcaaaggcagtagttctttttttaacgtgtcgaggtacgcttgctgcgcaagaatggcgccttctttaaagacgaggaccgggtcagcgatgatggttaattcaggatgctgtcgtagtcgctcacagatggcttttaaagtttccgtttgatgaaccaaaccaattttaacgtgcgttagtggcacgtagtttaaaatggcatcaagctggtccaaaatggtatcctcaggtaagttgtggattttcaagttaccgtctggtagcaatgtagcgatgcaagttaaggcactgaccccaaacgtttctaaggcttcgaacgtttttaaatcggcctggatgccaccaccacccagagtatcagagccggcaatggttagaatgttttgcatagttgtcctccaaaattctattcttaactatcatagagaagaatagaatgttcaacaacagccaattggcttgtttttttaccatccaatttgtaaactaaataagaggtgttaaaaatgattgaatggttacaatatttacctgaacaaaagccaaagtatatggcaattaaaaaaatgattattagcttgatagataaaggacaattaagttcaggtgaccaattaccgccagagcgtcagttagctaaattattgagtgtcaatcgttcaacggtgacacgtgcgtctgatgaattggttgcagatggcgtgattgaacgtcgcgttggtagcgggacgtttgtcagccagcaagcgcgaccacaggcaaggcgggtcaattggcatacttatttgatcagccaacgtcagtcacaaagtcaaaatgaacggcgccaattacaacaactgattagacgaaaacctgaaaagttaattgatgtttattcaagtgacttaccattagaattagtcccacaatttcaatttcctgcattgacgtggcaagattttattactgcacaagcattagagacaccacgaggctatcaaccacttattacggcaattaatcaattggatcaacacaataaacggctattttttaccgaagagcagttattaatgactgccggtgtgcaacaatcactctttttaatattacagggtttattgacgccaggtgatgctgttgcaattgaatcaccctccttttttcatgactcaactttgtttgaagcgacgggtgtccgtgtctatgaagcttcagttgatgctgatgggatttatttgactgctttagaagagctaatcattaagcaccgtgttaagttggttattctcaatccagattatcaaaatccaacggggcacgtaatgagttttcaaaaaagaaaagcagttgttcatttatgccagatgcatcaaataccaatcgtagaagatgatgtctttggttggttaggatttgatacaactaggccaatcccaacgttaaagcaacttgatccggataatgttatttatattagttcgttgtccaaaattatgggggctagtagccgaatcgggtgggtagctgctactccgcaagtcatcgaacagttgacccgtgtgcaacatgaaatggatttagtgccaagcattatggcgcaagtcatggtgaccttagcgatgggggatccgcaatttcaaacgcagttggatcaacttaaggggacgcttcaagaacgtgcacaagcaacctataagatgcttgaaagggtattacccgattggcacgtttacttaccagcgggaggttattatatttgggtgacccatccgaaccataaattacgcttaaaaacctttattgatcatcagcttgctgtcgcaccaggatcattatttgggcttaaaacagatgcgttgcgcatcaattttgcgcgattaaatgcaattgatttggtcgtgctagaacaacgattagtagccattattaaagcaacagaataaagagggggattcggatgacagagcaattcgtaccagagatttatacaccattaaaaaccagtgttgtcggaccacctgctgtggcgcgacaagttggggggattaagatcctcggtaagaagattaaaacaattatttttaccaccgatgttgcgattgtgaataatacaaatgctgacgctgttttggcagtttatccatttacaccacacccagctgtcatgaatgccatcagcaatgtggcgacgatccccgtttttaatgggattggtgggggcttaacggccggcagccggtccgcgtacatgggattattggcagaggccgccggttcgattggcgtggtggttaacgcaccgacctcggtggagacgattaaaatgattaaccgcgttgttgacgttccgattatttgtactgttgtgtcagaacaacaggattacgccgcgcagattgaagctggagtttcaattttaaacgttagtggcgcggctaaaaccccagcaattgttagtgcaattcgccaacaatatcccgaaattccgattatggcaactgggggtaaaaacgaagctagtatattagcgacgattgaagcgggtgcgaatgcattgacgtacacgccaccgaccaatggtgagttatttgctaagaaaatggccgactaccggtctgatttagcatgataacagttgacgtgctatgcaatcctccgtatgataaaaagattactagaggaggtctttgaatgattcgtcaagcaacagttgcagatgccaagagtgtcttaccaatcattaacattgtttttgaagaaatggaaatgccactcttccaaaagattccgttggaggatttatttggtattttagaacaggcctttgcaatgcctgaatatcggtatagttatgctaacacactagtttatgaagaagacggccaagtattggggattgttgtaggcttcccagaagaaaaggaagcccatatcgacgatgcattagcaccgttattcccacaaatcggcttacctgagacaacgcgtttctttaccgataaggaagcacaaccgggggaatggtatttagatacacttgccgtcgctgaacatgcacaggggcatggtgtagggacaaagttacttaaggccttaccagattatttaaaagcacgtggtgaaaaaaagattagcttaagtgtggatttacaaaatcctggcgctaaaaaactttatgaacgaatgggttttgttaaacaaggagatttaatgattggtgatcatcaatatgatcatatgattaaacagctttaacacgaaaagagccgacaacaattgttgtcggctcttttcagattaaagtaatggcataatcattgtcgtccatagccagctcagtggcatgactaagatcattgctggtatcatgtctgcaattggaaattcgcgaattttagcaattctaaagccagtggcgagcatcaagaggccgccgcaagctttgaaatctgcaagcattgttggattcgttagtgggaaaatgagtttggcaagtaagaaaatgatgtaaaagataatgaattgcggaatcgcaatggttgaaacgacggggccaagattgcaggcaaagatggcagcagtaaagaaatctagaattgatttagaaattagaatcgtattgttgcctgtcataccagcatctaatgtcccataaataccggtcccaccggcacaaaagaggacaatcactgtcacgagtgctgaaataaattcggtatctgatagcgtattgtttttacgcggaaaaatttagaaattggccgttccatcaagacggcaccgcgatcaatccagcgaccgaagtgaatgagtaggccaatcccagtaccgagaacaactgcgaagatgactgcaggcatgttcttcatttgaataatggcattgatgcccattcccatcgaagcaacaccgaagattaaggtgagttctgttttaaatttagttgataatttatctcccaataaactaccgaatagaccgccaaataagacggataatgaattaataatcacgccagttggcattgagaagacccctttaattttaagtttgcatattcaaccataccaatttaaaagaaaagaatcaatttaattttaaatgttagcgcttatatatattcgatgggagtcttgagctagaccaaaaaacgactaatcatttgattagtcgtttttttactgactattcgaatcgcaaactaggcttaaaacgccgaatcagtgccttgggttggttataggcccaatgatttaaaacggcggcaatcaaaatacaggggacgatatccttttcttggttgacagtcaattgaaaggctggaccgctgcttgctagaatggtggtcgcttgcatgatgggttgtgtatggtagataatgcgatattgattttgtgttaaatctcccataattaaccaattaagttgtttgacatagataaactcatgccagatgccccagatctttttgagttgaccaatccgttcatcgttttggaaaaggtcaaagtcaggtgaggggctaattgtgacttggcgaatttcaccgagtaagtcgccggtgagtgagtaaaggctgaatacgtcatgccgaatcccacgctttccaataagtaaataacgcggttgttcttgatcgtcaatcacggttgagacaccacgtgaagcactagcctggtgtttaatgtagaaaataggcatcaaagatcacttcttttcagctgtacgattcaagtcaatcgcgtgataaatcgcttgtgcgacgccgtcttgaatgttagttgcagtttgatagttcgcaagttccttaattgttgggacagcattgcccatggcgacaccaatgccagctgttttgatcattgaaaaatcgtttaagttatcaccaattgccattgtttgctcaactggaatccctctttgttcagcataggcggccaaagcgatacctttttgagcgtcaatgtggtttatttcgatgttattacttgaagaggaagttacaactaaatccccgcgggcttcacaaaatgccttaattggtgctaattcggtcattccctgtgtgctaaaagcgatgattttaagaatcttaaccgttggatcgttaataatcccttgatagtgatcatcgacgtagttaatattcattaattccaaacgggctgctgctaaagcaaccgcaattttataactcgtatcgggattgaggttgacgagtaaatcagcgacattttggatgcgactgactttgctatctgaataattaccggcagtcgtcatgagttcgaagtaaatattattttcgcgtaaattttctgtgacggctgtcaccgtttcggaatcaatcggcacattcaaaacttcattacctaaagaatcaaaaatttgggcaccattcatcgtaattaaagtaggttggatgtcatcactgtcaattagggggagggcttcagaacgactgcggccggtagccaccacgaattcgatgccggcgtcttgggcagctttaatggcggtcatgttaccgtctgaaacctgcattttgtcgtttaataaggtaccgtccatatcagatgcaataattgaaatcaaaggaattcctcctgaaaacgtattattagaaacttacctttatcttagcatgcaagctacttttcttctagcaacttatgttaaaacacgataaactagttaatgaggtgagcagatgaaaacaattattcacaatgagtggcaaacgattctcgcaccagagtttgccaaaccctattatggtcagctccatacctttttgaaacaggaataccaaacgaccacggtttatccagagatgcaccatattttccaagcctttgaatggacaccgtttgaacaggttaaagtcgtcattttaggacaagatccttatcatggcccgaaccaagcccatgggtgtagtttttccgttttaccaggggtcaaagtcccaccatcattgcaaaatatttataaagaattgcagacggatgttggctttcaaccggttcagcatggctatttaaagagttgggcggatcaaggcgtgttcttgttgaacaccgtattgaccgtgcgggcaggtcaatcaaattcgcatcgtaaacaaggttgggaacagctaacggatgcggcgattgctgcattgtcaaatcggggacatgtggtcttcattttatggggaaacgcggcaaaggataaacggcggttaattgatgagacgcaaaatgcggtcattactgcagtacatcccagtcccttgtcagcctatcacggtttctttggctctaaacctttctcacagacgaatactgcccttgagcaatggggcatggcgccaattaattggcaattaccacaaacagtcacggtagaataatgaagcgttaccattgttgacttgtcgcggtattagaaacgttgtatgattacattagcaataataaaatgcttactggaggttgcaattgtggatttatttgaaagcttaaaagcaaagattaccaatcggcaatttaaaattgtttttccggaaggaacagaaccaagaattattggtgcagcagcacggttgaatgctgatcggattttgaaacccattttaattggggcaacgaatgatattcaacaaatcgctgctgctaaaggatttaacttggacgggataacgattattgatccacaagaatatccaacagctgactttgaaaaaatggttgccgcttttgtcgaacgccgcaagggcaaggcaacccctgaacaagcacaaacaattttacaagatcctaattattttggcaccatgctggtttatttaaacttagccgacgggatggtttcaggtgccgtgcattcaacaggtgatactgttcgaccagcattacaaattattaaaacaaaaccaggtgtccaacgcacaagcggggccttcattatgcaacgcggtcgcgataacgaacgttacttattctcagattgcgccatcaatattaacccgaatgcgcaagaattggctgaaattgctgtggaatctgcaaagacggctgagttgttcgatatcgatccgaaagttgcgctgttgagcttttcaacgatggggtctgcgaaagcagacgaagtcacgaaggttcaagaagcagcacggattgcacatgaaattgcgccagaattagacattgatggtgacctacaatttgatgccgcatacgtaccagttgttgcgaaccaaaaagcaccagattcaaaagtggcgggtcaagccactgtgtttgttttcccagaattacaatcagggaacattggctacaagattgcccaacgttttgggaatttcgaagccatcggaccaattttacaaggtttgaatcaacccatttctgatttatcacgtgggagcaacgaagaagatgtttacaagttagccatcattacggctgctcaagcattacaaaactaattgaccgacaacaaagacgccagcacagaaaaattgtgctggcgtctttgactttgcgaacagggcttttttcggtataatgacacacagataacaattagaatgaggcagaacatgttagaatttaaaacaactgatccagaacaaacaattgcgattgccaaacagttgggccaacaagtccaagccggtgatgtcttgttgttggatggtgatttaggcgctggtaaaacaacgtttacgaaaggcttggcagctggtctgggaattgaccgctatattaagagtccgacatttacgttaattcgtgagtatcaagacggtcggttaccactctatcatatggatgtgtatcgattggaagaaacgggcgccagtgatttaggcttagaagagtatttcgatggggacggggtttcggtggttgaatggagtcaatttattgctgaagaactaccgagcgattatttgacgattcattttaataaggatgttagcgatgatcaagttcggacgttagtacttgatccgcacggcgctcactacgaagcattggtgcgtactagttttgcagactagtgtaattgacattcggcccgcgcaagcagcagatgcgcgggcttatttatgctttctaaaggcggtcgctaaagaaacaccgtatgttgcgttaccagcggagttagccattttaacaccattatttactggatttttgatagcaagtattcttgaatcgcaacaagatgtattattgcttgcttttgatcaacagcaaattgtcggggcaattcgtgtgaatagtccgacagaacaggggctaacacatatcagtgaagttagtatcgctgttttaaaagcaaagtggcatcgcggaattggctctgatttgatggcgcaccttttagcgtcggttcgagaaataggaaatccgcgacggcttgagttaacagtacaagcccgtaatcaccgtgcaattgcactttacaaacggtttggttttgtgaccgaagcacaattagcagccggattttatgcgccagaaacgggctatattccggttgtgcaaatgtgccaattaatgaatatggatgaggagatttaagatgcaacaacaacgaggacgcggaatttacttagccgtattaggatcaatattttgggggattcaagggccagtatcacagtggctattcactgacacggcaattaagccagaatggctaatgggggttaagatggggctttcaggcctatttctattaggttatgcgctcattaaacaaccgaacgatgtttttacagtgtggcggcaaccgcgggactttacgcggatgttattatttgcagtattagggttatcggccgttcagtatttttattttctaacgattcaagccagcaatgcaccaacgactacgattttacaacagctaggcaccatcatgatcatcttaattagcttggtgatttatcgtagagcacctagccgcgttgaactaattgcagtgactgttgcattgttggggacgtggttgttagtgacaaaaggacaactgacgcatttggcgatttcacacgcggcattcggacttagtttatgccttggcttttctggcgctttaaacacattaattccggttaagttattccaaaaatatccaacattagtgattgtgggctgggcgatgttaatcggtggggtggtcttcacatttgttcatccattttgggtcggtgttccaccgttgaatgtggcaacaatcagcagtgtcttattcattgctttgtttgggaccgcgctcgccaatctttgtttcttggggagtttacggtatattacaccgacaacggctggtttattgaatacctttgaaccattagctgcgactatcggtactgttttattcttgaaaacgagtttcaacacctgggaagtcgtgggtgggattctcgtgattagtacggtgtttatcttgagtcttggtcaatctaagtcaaaataagttaacacgatgaaccgaattgtggtataattaacaacggaaacgaagctcgtacattagtcaaaacaaattaatgattatgatgaagttgttaatcttgtcgaagccctaatgacaatttagctttaatccaccattcgctaaaagagcggttagcctgtctgcatagacaagttaaccgctctttttttgttagccgattaatttggtggccgcttttagcggttcaacgccaaaatcgttggcttctttaatcagaatcttggcacaagcgatactatcagccagtgcattgtggtgattgtcgagtggaatcgctaggttatcacacaaggtgtttaacttatgattctcaaattgcggatacaaccgccgactcgtcttgagagtatccaacgctaaataatggggttctggaatgtcgtagtgttggagtgtacttttcaacacaccaatatcaaaattcgcgttgtgggcgaccactaacttgtttggcgtgaaaaatggtgcgatgtgcggccagacttgattgaacttgggcgcttgagccacatcggcttcatgaatgccatgaatttgcgtattgcgactgctaaaataagtttcaggtttaattaacgtataaaaactatcaacgatttgatcgttgcgcacaacaacaagggcaagtgagcaagcactatgccattgaccgttggcggtttcaaaatccattgcgacaaaattcattattttgaacctcgctttttataaagtttgcttattctaagcgaataaatcttgcgtgtcaagttcgacggggcagtggtcggaaccaaaaatttccgtgtgaatcttggcatcgactaatttaggttggagatcattggaagtaatgaaataatcaatgcgccagccggcattattgtcgcgggcgtggaatcgataactccaccaagaataaatatcgggttgatcaggatagaaataacggaaggtatcggtgaagccgcgatttaagagggttgtcatttgccctcgttcttcatctgaaaagccggcgttatgatgattggtcttatcatttttcagatcaattggttcatgggcaacgtttaaatcaccgcagaaaatgacgggtttttgagtcgataaattagcgatataagtttgaaaggcattctcccaacgcatgcgatagtctaatcgtttcaacttatcctgtgaattgggtgtgtagcaagtgattaaataaaaagtagggtattcaagtgtaatcacgcgtccttcttgatcgtgttcaggttggccgataccataagttgcagtgagcggtttatgcttagtgaagatggcagtaccggaatagccctttttttcagcgtaattaaagtattgatgataacctggtaaatctaattcaacttggccggcttgcatcttagtttcttgcagacagaaaaaatcggcatctagttgattaaaagtgatcataaagtctttttttaaaacggcgcgtaagccattaacgttccaagaaataaatttcattgtcgattcctcatttctaaattccattttaacggtctagtcaataatacgcaaaaaaagtgttggctgttcaattcaagccgtctttgttaaactaggagtagattattttttgaggggaacgacaattgtgacaagtcaagttgaagcatttttacaagcaaaccaagcaatcgagattcatcaagcagaaccattgagcttatacacctttaccaaaacaggtggaccggcagatttactcgcactccccaaatctgttgcagaagtgcggcaattagtggccagtgccaatgaactgacattacccattacaattatcggtaatgctagtaatctaattgttcgtgacggtggcattaaaggcttagtcatcatcttaacggcgatgaatcagattaaagttgaaggtaacttggtgaccgcgcaagctggagcagggattattcaaacctctgaagcagcttatagcggtagtttgaccggcttagaatttgctgccggcattcctggtagtgttggcggtgcggtctttatgaacgccggcgcatatggtggtgaaattagtgatgtactgacccgcgttgatgttttaatgcgcgataatcaagtacagacgttaacggccgctgacttagacttcagttaccggcatagtttaattcaagataacggcagtattgtgttggttgcctattttgaaatggcaacgggtgcggcaccagcaattcgcgcccggatggatgaggtcaacgctttgcgggctgccaaacagccgctagaatatccctcatgtgggagtgtctttaaacgaccagtcggtcattttgttggaccgttgattcaaaaagcgggcttgcaagggcatcaaattgggggcgcacaagtttctaaaaaacatgccgggttcatcgtgaatattgatcacgcaacggcaacggattatttgacgttgatcgaatacattcaaaaaacgatctgggcgaagtttaatgtgcgcttagaaccagaagtccgtattattgggcaacataagcaaggttaaatcaatgatgaaaagctatggtaaaagatgattttatcagggctttttttatcaggatgagcgtgttaaaaagaaagggtgttgggatggcaattattgaagctgttattttgctaattacgttggtgattattgccaatatcatcgggcattatttgccaaatttaccggttagtttaattgagatcgggttgggattaatggtggcgttagtctttgccgtcaagattccactaaaaacagattggttcatgttggtgtttgttgcaccattattgtttaacgatggccgtcgttttcctaagaaggaactatgggcgttgcgcggaccaattattgggaatgcgattttcctcgtctttgcaacgacgttaattggcggcttggccattcattggttagtcccggcgttaccgctggctgcaagttttgcgttagcggcaatcttgtcgccaacggatccggtggcggtacaatcgatttcagaacaggccgatttaccgccccgggttttgcacttagtgagtggtgaaagtttaattaacgatgccagtggcttgattagctttaaatatgggattgctgccgctgttaccggctatttctcatggcaacaagccgcgggcgattttctgtatattagtattgttggcacactagcggggatgattatcatgttaatcattcattttattcgcctatttatgctacaacaaggctttgaagatgtgatgttccatacgattttacagttggtgacaccgtttatcatctatctaattgttgaagatctattccacgcatccggtgtgattgcggtggtggtagctgggatcatcagtcattcatcacggaatatcttcctcgattttttaccggagttgaagttagtgaccgaacaaacttggtcaatcagtgtttacttattaaacgggattgtctttttaattttagggattgaattacctgtcgctatgcataataccgtgcataatccgctgattaatacgagtgaagaaattctcctcgtcttagcggtttggttgattctggtgattgtgcggggactctggacactagcttacttgctctacaccaaccagacgaatcccaaaacattccgcgaaaacattaaaattgcggtgctctctggactttctggggttcgtggagcgattacgatggccggggtattatcggtgccaactgttttagcggatggttcaccgtttcctcaacgcggcttaatgctctttattgcggccggcgtgattattgtcagtctggtgatggccgttgtcttaattcctaagctgacaaaagtcaaagcaccaatcgagatgcgagggatgcaacgagatcttgaagccgaagcagccgcagaagatgaagcagctgctgatttattggatgaaacaaacgctaagatttacatgtacaaagtagcagcgagcatggtcgaatcccaacggcatattgataataaccgggctgctttagatttattggcagagtatcagttgatgatccgccggttggagagtcaacaaagcgaagcaagcacaagtgacgaactaccaccgttaattgctgaagagttgattttgcgacaagtggcatttgacggagaacgtcagaagttagagttgttatgggctgaaaaggccattagtgctaaaagctatcggcatggtaaacgtaagttacggcaaaaacaagtaatgttatcggttattgggacgagttttaattggcatcatgtgcaactacaagtctatcgtgcttggtcaatcagcaaacgctttttgacgcatctctggccgcggcataccaaatcaccaagtgaaaccgagtggcaattgactgaacgtgaaatggctaaggcgggaattaaacaattgtcgtatttcctaaaacagcctgaaaatcgccaacgtcattataatcgtcaggttatttatcaaattattgtgcggtatcggaatcagattgaaaacatgaaaaatggggggcggagtaagaccgctatctatgaacgtcaattacaaaaattaagaatcaaagcgctcacgagtgaacgagtggcgattcaagagttattggaacaacataaaatttcatggcaacttgcagatgaattacgcaaaaacattaactattccgaaaatgcactgattttagcacgaacggatactgaatagattcaaaaaagccccacgcactcattttaaattgagtgcgtggggctttttttgatggttagaataagtggcggcggcggtagtatttgtagctgtaataaccaccaattgcaaagccggcgctgattagtgaaatcgtcaaaccccaatagaaataaggtggccagtatttaagggtaacggtatggtgaccttttttcagcgggatggcgatgaagttcttcaagccgcgtttgattttaaccggatggccgtcaaccgttgcatgccaaccagcagcataggggacggttgtcatgaggacttggttttgttgaggaatggtgatcgttcctttgatggttgtgtttgagaaagtattcagtttcaatgcatgtgcacgaagttgctgcgttaggtgcgtcaatgcttgataattcaaactatataaattaatattttggagccaaatttcctttttagagaagctaaggtcaacggtttgttgttggccgattgcgttacttgtcaggtttaagacgacagtatcgcggaaagtatcgtattgttgtagcgtgtgaccgtttaatgagacctgaaccgcatttttttcgaggcttgagcctaatgtgaggtaataggggtcactcgttgtgggtgtgaaggtatagatgacgtgagctggattcttcggatcaacccggaggaaagtttcgttgagttttggtttttgtttagcattcttgtaagtgacagtattgaaaaattgaagtgtgaagagtggctgttctgtcgctgaattgactaagtctgccgcaatctggttctgttcaaggatgggataattggcaaccacatgatgtttaagcactttttcagaggccgcaaagcctaaatcaagtgcgttggggttttgataaattgcaatttgatctttttttttgagtaagttataacgtgctaagtccggcttattcgtactgagtggaattgttgcttgcccactagtattgttaaggtagtagcgataacctaataacgcatcggtgaacagggtctgattagtatcggcaacggcgccatcgccagctggttcgccaatgctgcccatgaatttcggatagctcagttcgagcatcgaattaaaatgagatccgccgaaataatcagcttgcatcgggtcattttttgtccgcataaaggttttgccaattcgttgaaacgcggttttatttggaattgcgctaatggctgattgtaaatgagctgtataatctgcgtaatctttttgtgagacatagctaatttgattaagactcattgtcgcgttggtgaccatctcaccaccgacgcatagaactaagagcaaaggataatagtgcttgagcggctttttcaggagtaaaagcaagcatgtcatcagtaagaaagcgatgcttaagttaatctgattaggacttagcgcggtgaagctcttgagatgtttggcagtataaccaaaagccgccatcaacattaaaaacggcaacaagagttgataccaactaagtcgggggtgctggtggagccgttgaaccgcgagcacgattagccaaaagctaaccacatatgaaaagcggtaaggataccaaactggaaattgcatgccgtgccataataaatcaaggggttcataacacattgaaacacctaagaaaatggtgactaataaggcaactaaccgttcttgccaggcaatcttgcgtgttccaaaatacaagatggcacaaatcaatacgagactgccgacgaatatattcggttcgccttttggcatttggtcgaagttaaaattgccaatcacaagtttagaaagcatcttaagcggattatattcgaacttccaatgaatcttttgaatcgtgtactgccctttgctctgcgtcaattggaaaaaagttggcaataggagccaggctgagagtaaaccggccaagagtgagccactgatgaagcgggcagcgcgttgccatagatggcgccaagtttgccaataatgagcacaagcccacgcaaaataagcaatgacaaacaggcaaaccatatagcccatataatagttactcattaagagtgcggcaagactcaatggataaagccaaaagtgacggcctgtaaagagccggtcgatgcctaagacaactagtggaaaccagacgagtgcatccaaccacataacgttaaactggttggcaattgcaaacccggataaggcgtagacaacactaagtgtcggtaaccaccagctatggagtagtttgttagattttaagtagtacgcaaagctaagaccactggcgcctgttttgaaaaggacaagcagccaaacaccaaaactcaaccaagttcctggtgtcaataggacgattagattgaatggactcatcaaatagtaagcccagaccccaagcatgtcgccccctaagcccttagcaaaggaataaaaaaaagtttcgggatggtgcaatagcgtacttctgaaaaaagcgtaaaaatcgatgtattgttggcctagatcaacagtcaggattgtttgccctccaaaagggaacacttgtcgaagtagtccgtagataaataaaatgccaaatggtagtaagaaactaaggcctaatgtataatgacgacgtgcaaaagcgtaaaatcgactcacggtaatcctccaattaataaaaaaatctaaaaattaggttgctagtccgtttttaactgagaaaagctgtaaaatataaccagttaatgactatgcttaagcataccataatctcgtttgaatttagagatttggcatagcttgtttaagataattttgctaaacttaaacaatacagcacaaaatcgctcaaaaggtcgcttggcgactttttgaagcatagagcggcgccatcttttactagagcggcgctaaataaggagtatctgaccgtctgtgaaaatcattaagagaaaaaacaaacaaaatcgtgaaaaatcactgattccattccgcttaaatttcctattattcgttgtcttcgcgttatttgccgcgttgattatgcaattgggacgcctgcaagtgatggagggcgctaattttcaagcgatggtcaacagtactgataagaaaatcgttacaggtaacgtgcctcgagggatgattctggattcaaagggccgtgtcttagttgggaatactgctaaaccggcgattacttatacgaagaatatgaatgtcttggcagacaaaatgtatgcagaggccaataagttaacccaatatttaacggtcccgacggataagttaactgaacgtgatcagattgattactacctcagtaaccccaagaatcttaaaaaatggaacgcaaaactgcctaaatctgcgaaggttgccagtgatggttctgagttgccagaaaagaaggtttatcaatcaacaatcgaattggttaaaaagtcgtttaaagggttaaacgagcaacaaaaacaagccgctgcgattttcaaaattatgagtggggcttatcaattatcgacagtttatattaaaaatacggatgtgactgataaggaaattgctgaaatcagtgaacatctaacgagtttgccagggattaatgtcagcaccgattgggaacgggcttatcctaatggcgattcaatgcgcagtattattgggcatgtttcaactgaagagcaagggttaccagaagatggcgtcaactccttgctagcacagggctattcgcgtaatgatcgcgttgggaccagttatttagaaaagcaatacgaaagtgtcttgcatggttctaagtcgcaatcacaagttgaagttggtgcgaataatcagattctctcaagtaatgtcttatttaaagggcaaaaagggagtaatttaaatttaacaattgaccaagcttatcaaacgcaagtggaagcggctttgaagaaaatctatgatcaggcaaaagcagcgggagccactcagtattctgatggtgcctatgccgtggcgatgaatccgaaaacaggtgctattttagcaatggctggcgaatccaacgatcgtaagtcaggtgaaattgccgatgatgcgctcggggtgattaatcacaccttcgtcatggggtctgctattaaaggggcgaccgttatggggagcttaatggatggtgtgattacgccaaccaataataccttaccggatacaccaatctatttaagaggaacgccggttaagaaatctgtttacccagttgggacgtttggatcattgaacgctgaatcagcgttggaagtttcttctaatatttacatgatgcaattagcgatgttagaagggcatgccaaatatgtacccaattcttcgttaacgatggattcagatatctttacgaagatgcgtggctacttcagtcaatttggcttaggacaaaagactgggattgatttgccaggtgaagccaccgggatcgaagggccaaccgtcaatgaatatggcgagccagccaatggttcattacttgatttatcttatggtaactacgatgcctacaccttaattcaattggcacaatacatttcaaccatcgcaaacggtggtcaacgaatgaaaccataccttgtggattcgattcaacaaactggtaacgatgggtcagctggccaagttggtaccaagaccacgccgacagtgcttagcacagttgatgcgcccgaaagttactttaatgtcgttaaaaaagggatgtacaacgttgtcaatgggaccaacgcttgggggacagcacacaccttgaaagatattaaaccaacgcttggcgctaaaaccggaacggcacaatcatttgcccgtgaagatccaaacgattcgacaagtaagcaagtcgaaaccgttacttctagtttggttggctttgctccatacgataatccgcaagtggcaatcgccattgtgttcccgaacttaaactctgataaagggcactacaatacgttactagcccgtgaaatgattacgagtttctataaattaaataacattactgaatgaaatattccaaaataaccttttcagataccataaaaaatggtatgatactaagagtctaagaattaaacagttttttagaaatttacttacagcttggaggctatatcaatgcgtgttcacattacaatggaatgtacagaatgtcacgaacgtagttacttatcaaacaaaaataaacgtaacaatccagatcgcttggaattaaagaaatattgcccacgcgaacgcaaagtaactttacaccgcgaaactaaataatagtgacgcacatcaaaagtcggggcgcttcgcgctcgggcttttttttattaaggaggcttttgaatgcggactaaaaagcaaattcggcaacaacaaattgcggcattacaaacgcttgcgcagacgcctgcgcttaaacatgcccaagaagcacaacttttggaattgttaatggcaaccgaggtgtttcaaaaggcaacaatcatcggtgtcacgttgagtcagccaattgaaatggcgacccagccggtaattgatgccattcgtttggccggtaaagaagttgtagtgcccaagacattgccagagcgacaaatggctttttacccgttaacggcaaccactgaattaacaacgagttcctatggtgctttagaaccagtggttacagctggtagccaggtgttaatccctgatttaatgattgtgccgggactagcatttagtccagaaggttggcgggttggttttggtggcggttattatgatcgttatcttgccaaatatccaatgccaactgttgcactagcgcttaaaccacaacaacgaagtgctgattgggccattgatgaattcgatatccaactcgatcaggttcttcaggtctaaaggagaaaagatgactaattttaaagaacgttggcaagacgcaccgattgtggtgtatgccttgatgttactaatgattttgatgtttgcaatgatgtttttgaatccggttgtatggttgaacggctttacatcggttaacatgctaatgaatggccggattattgggtttatgatggcatctgtcaatcatggccggtttatgaatctcttcgtagatttggttattttgttttttgttggtggacaacttgaacgattattaggacactggcgcctattagctatctatatactgagcagtttggcgagtttgtttacaacgggcgctttttttggcctcgatacaccaaccgtgactgctggaacagctatcttagggctattcggtggcttcttgatgttaggtgatgcctttaaagaagaatccgtgctaggacaagtggcacgccagtattggctgtttttatttttaacaatcggattacaatttattgtcgatcacaatgcattgtacgcaatggtaggtggggtacttggcggctttttaagtagtatggcgctgggtgcacctaaagtgggtaagattgacccgctgaaccgtgtggtgagtgggttaatttatgttgcaacgatgattttatttggttttctgggtatgaatcattaatcaatttatgtataatgttaaaggtgaagttgatgagaactctatatgatgtacaacaacttttaaaacaatttggcgtttacgtccatcttggtaaacgactttgggatatcgagctcaccagtatcgaattacggcacgtttatgatgcggggttaatcgatggcaaagtgtatcgtgatgctaagatggttttagtgcgtgaacatcggttggagaaaaatgaagcgtttaatcacaatttattggaggagaagtttaaatgacagacaagaagttaatcggcgttgatttaggcgggacaactgctaaatttgcaattatgacaatggatggcgaaatccaacaacgctggagtatcgatacggatattttagatgaaggtagccacattacaccggatatcattgaatcgattaatcatcatttagatttatataacatgacacctgctgatttcatcgggattggtatgggcacacctggtagtgttaacagtaaagaagggaccgttattggtgcttacaacttaaactggaagacaacccaatacttacgtcgcgatatcgaagctggcacacacatgaagcttgcaattgataatgatgccaacgttgctgctttaggtgaacgttggaagggtgctggtgaaaaccaacccgatgttgcttttgtcacacttggcactggagttggcggcgggatcgttgctgatggccatttattacacggtgttgctggttctgcaggtgaattaggccacgtaacagttgaaccacatggttatgaatgtacgtgtggcaaacaaggttgtttagaaacttatgcttcagcaaccggtgttgtgcgcgttgcacgtgacatggctgaagaatacgctggtaattcaaaattaaagacaatgttggatgatggtgaagaaatcagctctaaattagtttttgacatggctaaagaatcagatgcattggctgttaaggttgttgatcgtgtttcttactaccttggtttagcattagctaacgttgggaacatgttgaatcccgcttacatcgttatcggtggtggtgtttcagctgctggggaatttttacgtaaacaagttgaagcttactttgaagaatttacattcccaaatgttaaaaatacgactaagattcgtttagcaaacttaggaaacgtcgccggtgttatcggggctgcttcacttgcacttcaatttgatcaacaataatttgttataagggagtcttatcgatgcttgtattagggacaattaatgtatgggtagtaattaatattattctgatcgccattttactttggttcttgggcgattgggcatattatcaaattcaacgcaaacgcttaggcggcgaattaacggaagcggcgtttgaagaaacaatgcgcaaggcccaaattgtcgacttacgggataaaaaagattttgatgcaggccacattttaggcgcccgcaacttaccttatccaatgttgaaacaaaatatgggtgaactacggatggacttaccagtctacttatatgatgcaggcattacgctcagtatccgagcagcactgaagttaagaaaagctggtttcaccgacattaaatggttgaaaaagggttatgctggttggaccggcaaaacaaagcgtaaaaagaaattaaattaaaccaaaaaagcccaagagttactagcgaaaaaaactagtcaactgttgggctttttatagagtgcgcaggcagatggtcatactctgaggattagtggcataccgtaaatgagcggcagagccgatcgtttgcggtatgtaactaaccgaaagagtatatctggcggcgcacgtttcaaaacagagtgcgtttaaagcggtttgactctgagcattagcatagtgttgttaatgaccgacaaagtcggtcgtttgcaatacgaagctaatcccaagagtcagctttaaaaagcacgtttccacaaaaaaagtccgtcgccaatcaggcaacggacgcagtcttttcaaagcgcttagccttggtgagctgaatggctcttacggttagcacgtcgacgactttcttcaatttgattttctttttcttcgattggatcaacgacggtcttcttaaatgccaagagtgaaccggcaatcgcgccgactgttgaaacggttccgattacgaaaccttttagaaatttatgtttcataggtaaagcctcctcaagtctcaattcattcaagtacaactttattatcgcgtatttaagcgcgaatagctagtaaaatacgttaattaatgtggtgaaaatatggaaaaagaaaagctaatcgtcattgttggtccgacaggcgttggtaaaacagcgttaagtctacaactcgcacaacagttgcaaggtgagattatttccggggatgcgatgcaggtttatcgccagttagacatcggtacggccaaagtcacaccaaaagagcaggcgcttgcgccgcaccacttaattgatgtggcggatatcgatcaacgcttcactgcctttgactttcaacagcaaggacaacaactcgtcactgaaatcgtcggccggcaacacatgcccttggttgttggtggaacgggactttatttgcaggcgttactgtacgatatgaccctgggtagtgcgcaagatgcggaacagaattttacgattcgtcaaaaatggcaaacttttttggatcagcattctgaagaagctttgtggcagatgcttaatcaaattgatccgcaagcagccgctaaaattccgagtgcgaatccacggcgtgtggttcgcgcattagaggtttatgaaacaacgggaactttgttttcacaacaaaagccaaaagaattacgttatgatacgtttattattggattgaattgtgaccgtgcattattatacgagcgaatcaaccggcgggtggatcaaatgatcgatgctggacttttagaagaagcgcggttggcttatgcacatcgtgaaacgagtccgcaagccgtgcgggggattgggtataaagagttcttcccatactttgatagtgactgttcattagacgtggcaattgctcaagtaaaacaaaattcacggcactacgcaaaacgacaactaacgtggtttagaaaccagattccggtcaattggtataatctggttgaacaacctgaagccgatttggctcggattcaaaccgatttacaacaatggttacagcaataatagaaatggagtggttaaaaaatggattggcaagcaaacttagcaccagaattacaagctaaaatcgcagcagttgatacgcaaatcgcaccgcgtttacaagcactggatgaacaaatcatcaataatcaagcaaaggtgctcgaagcgtttcaagcagaaaatatttctgaatcgcatttaaacgggacaaccggttacggcaacgatgatcaaggacgcgataagttagaggccgtctatagtcacgttttcaaaactgaagatgcgcttgtgcggccgcaattggtttccggcacacacgcgattggaacggccttattggggatgttgcggcctggcgatgatcttttatatcttacgggcgaaccatatgatacgttgcaagaagtcatcgggatggccggtaacgggattggttcactaaaagaattccaaattggattcgattttgtgccattattagctgatggtgccgtggattttgaaacggcccggaccaaaattacagctaagacaaaagtgatcgctatccaacgttcacgtggctatgctgatcgcgatagtttcacggttgataaaatcaaggaaatgattgcctttgtcaaaaacattaaccctgaattgattgtctttgtcgataatgcttacggtgaattctctgaaacaacggaaccaacagaattcggggccgacgtaatggccggttctttaatcaaaaatgctggtggtgggattgcgcaaacgggtggttacatcgttgggactgaaaaattaatcgaaatgattggttatcgcctgactgtgccaggtgttggtgccagtgaaggcgccacacaaggcaatctgcaattgatgtttgaaggtttcttcttagcaccaagtgtgactggtaatgcgattaaaggggcggtttttgaagcagcgcttttggaacaaatgggcttgagtgtctcacctaaatgggatgcccctagaacagacttgattcaaacggtgaacttcggtaatccggatgatatggttaagttcgctggttgtgttcaagcgcaatcaccaatcgattcatttgtgacccccattccaagtgattttgccggttacgaagatcaaatcgtaatggctgccgggacctttatccaaggtgccagcatcgaattttcagcagacggcccattgcgcgccccatatacactttacttacaaggtgggttaacttacgcgcacgttaaactcgcgattagtcgggcagtccaaacaaccttctttgaaaaataaatgccaagcggtcaatcaaattcgcgtttgattgaccgctttttttgtgcgttaagcatggtatgataagggtgcaacgaatcgtagcggtcggttttaagagatgctttggattgttgctagtataaatgtgtcattctcgctacggtaagtcttggaggtggttagatgttaattggtcaacaattaaaacaatttcgtttggatgcgggctactctcaacagacactcgcagagcagattaatgtgtcacgacaagtcatttctaaatgggagacggataaaagtgcaccagacttgaatacattggttgttcttgccaaattgtataatgtaagtttgaatactttgctcggggttgaaacggtcactaaaccgaattcattctttgggcggttgcggcaacattggcatttggcagaaagcgaaaatacaaaaccgctgtccgatttaggacggattatgcaacaacccgaacaacactatgtggatttagcacaacagttcagtgtcactttgacggatgtaactgttactagtgatggccaaacaatgccagcgaattggcggcaagcacggagtccttatttaattgtattagaaccgcgccaaatttgtttaaagcagacagatgttttaaaagtcatgcccgcaaaagttgttaagcaacttgcgacaacggaaattcgaacaattcattatgtggtcatgcagactgctggaccatcaaccattggcgggttacaaggtatcgggcacgcttatcgggccatcgtgacggttgatacaaagcaatccgtagcaccatactatattaccaaccaggattttcttcagttggcaaaagttctgaaagcttatgcacaacaggaacacgttcaatttgatgatcagatggctttgctgccttattttatgacgcatgacacaactgactgctttaattatttagaggtacattacagcgaattagcggaaaaagttggggttccagcagaaagcgcaggacaggcggtttatcgatggtagatgaaacagcaaaaaacaactttgaaacggcgacagatggggttcaggcttatcacaattattttggcacgccaacgcacgatgatcgtatttggtttgaactcttaacagttggggtcttccaagtggggttgagctggaaagtagctgcaagtaaaataccagttctgcgacaacaaatggtggggatggtgattgatcaagtcgcacaatttgatgaaatggatgttgaacgcctgcaaaaagaaccagatatgattcgtaatacgcgtaagattcgggcaacgattcaaaatgcgcgggcaattcaagccatccaaactgaatatggcagtttttcagcgtatttgtgggcgtttgttgatggtcagccgcaattgcttgattcacaaatggctggcgtgtccgataaatcagcgccgatcagtacgcaacttgcgaaagagttaaagaagcgccagtttaaatttgttggaccggtggtaacgcatttgtttatgcttgcaggtggtttgattcaaatcatcgatgaagactaatgcctaaaaggtaaaccaaattggtttacctttttttgttggctgatgttagaaaatctgacatcaaatgttgaccgtttgaaaggcgactggtaagataaaacgcaagtgaggtgaaatggatggctgaaaaacacttaaggcgcaacttagcagttttaccaattggtacggtaatgaaattgacgggacaaactgcgcgtcaaattcgttattatgaagcacaggcgcttgtttttcctgaacggacaacgggccatcaacggttgttttcgttgaacgatgttgatcgtttgttggaaatcaaggattacctagctgaaggcaccacgatggcacagattcgccagatttatcagaagaaggcggatcggcagcgtgataaacaattatcagacgaaaaagcgcggcggttattggccaatgaattattatcggtcggcggcttagttggacaacagtcaaccatttcacaatcatctaaattatattaaggggcgacggattaatggcacgtaaagtattgacagcagaagcaatcaagcaattagtggatcaagaaaacgttaagttcttacgtttaatgtttacggatatcaacgggattatcaagaatgtggaagtaccaattagtcaattagataaagttttaagtaacaaaatgatgtttgacggttcttcaatcgacggttttgtccggattgaagaaagtgatatgtatttgcggcctgatttaagtacatggctcattttcccatgggaagcggaacatggaaaagtcgcgcggttaatctgttctgtctataccgcagatggagaaccattcttaggcgatccacggaataatttgaagaaattagtgcgcgaaatgcaagataaagggttcaaagactttaacattggaccggaaccagaatttttcctctttaaattagatgaatacggcaaaccaacgttgaaactcaacgaccaaggcggctactttgattttgcccccgttgatttaggcgaaaactgtcggcgtgatattgttttggaacttgaaaagatgggctttgaagttgaagccagtcatcacgaagtcgcacccggacaacacgaaatcgattttaaatacgctgatgcagtcgatgcagcggataacatccaaacctttaaattagtcgttaaaacaatcgctcggaaacatggattacatgcaaccttcatgccaaaaccattacacggtgtcaacggctctgggatgcacattaatatgtcactctttaatcaagatggtacgaatgccttctacgatgaaaaaggtacagaacaactttcaaaaacggcttatcatttcttagctggcttattgcaacacgcacgcgccatcacggcaatcaacaacccaacagttaactcttacaaacgattagtccctggttttgaggcaccggtttatgttgcatggtctggtcataaccggtcaccattgattcgggtcccacaatcacgcgggttatcaacgcgtctcgaactacggagtgttgatccaagtgccaatccttatttagcaatcgggtcgattttggcagccggtttatctggcttagatcaagggctcttgcctgatgctggtgtggatcgcaacatctatagcatggacgaaacagaacggaaggaaaatcacatcactgacctaccatccacattgcacaatgcattgaaggaactagccaaggatgagattatcaaagattcaatggggccttatctctaccagagcttcatggattctaaatcattggaatgggcagcttatcgtcaacaagtttccgaatgggaacgcgaacaatatttggaactctattagtcgcaatttacgccatgtttttgtacaattaaactttagaaatagaaagttggtagagtatgaaaacattggtgattatcagccatcccgaaattgagacgtcgatggtccaaaactttttaaaagcgagtgcagcaccactggaagccatcacttggcaccacttagatgcgcttgagacgttagatgtggctgctgaacaagcattgttacgcaaccatgagcggattatttttcaatttccgctctattggtatgctgctccagcgagcttaaaaatgtggttggacaccgttttaacggggcaatttgcctttaatggccgccaaccattagccgggaaaacactcggggttgtcgtttcaactggtacggcggctaaacattttcaagctggcggcagtgaacaagcaacgctgtctgaaattttgcgcccatatgaattggtggctcgtaagctagggatgacctatttaccaccacttgcgattcatcaattgggttattggcaagaaactgataaacaatgcttggtcatcgattatcaacggtatttgacgcaatccgagttcaattttgatcagcaattagcgtggtttgaagcgatgctgactaaaaaggctgctgaagccacatcgcctgaagcgcaacaacgtttaatgcttttaagcgaacaattcgccgacaaacgatcggaattaaccgatttgaattggcaagtccaactgattcgcgaagaagagggggaaggctaatggattggttaacagaacaaattcaactacaaaaagaacaagccacaacgtatgaagagcaagctttttatacggcgcttcaacaaacgagtgatgaactagcattacggattgaacaacgccaaggtgaacttgatggtcgaatctggaatgcaacgaattggtaaactaatacaaaataaaaaacgccgcgacgaaagtcggggcgttttttgtgtaattcgattaatagcgtttgattaatgtatcgaaagcatcaacgattgcttggaagaaaccaagtgtatctgggtttgtgatttcttgattgtcatctaataagttcatgacattgccgatataagcttctggttgttgaaccgttggcatgttcaagaaaacaagtgattgacgtaagtggtggttagcaccgaaaccactgattgcaccaggtgaaacgctgacgatttcagctggtttgttatcccagatgcttgcaccataaggacgtgaaccaacgtctaaagcatttttcaatacggctggtactgaacggttgtattctggtgtgacgaataaaacggcgtccattgtcttcattttatttctgaaagttgtgtaagcttctggtacttgatctaaatcatcataatcttggttgtacaatggtaagtcaccaatttcaacaatttctagattataatctgatggaaataatggcatcaatgatttagcaactgatttgctaaatgaatctttccgtaaactaccaattaaaactgcgatattttttgtcatagtgaaacctccaattgttttacttattattagtaagtaactttagtatagcacgttcccctgaaaaggcaaccacttttacttactaatttaagcatagcgaattggtgaagcttttagcaaacaatatggtcggccattgattggcattggcaagctataaatcgtataatagcagtaagtagaacaaagatgggaaatgaataatggaaattaaatggcacgtcaatcaaccacaatctgttaaacaattcttgctagcaagtggcatcagtcaacgattgtacgccaaaattaaggcgttaggccaactgattctagtaaacgggcaaaaaagtgcgcctagtgatcaggtacaatgcggcgatgtggtcacattgcagttaccagctgaactggccgatgaatcagttgctgttagtcacgaaccaatcactatttgttatgagaacgagtattggttggcggtcaataaaccagctggcttggcaacgattccgggtcccactaatcaaacggatactttgttgaatcgcattaagggttactggcaagcgcagggtgcaacagatttagtaccgcatatcattacgcgcttggattttgatacaagtggaattgttttagtcggcaaacaccaaattgcacaaagtctattgcaaccgcagattgaacagcatcaattacaaaaattctatttagcagttgtttcaggaacgggtttaccagcatcaggggatattcgtgaaccgattggacaaatcgaccatcaaccgcggcgtgaggtgttggcggatggtcagtcagcttggacgagttattggcgcttgggtgcatcgggtcagttgacggcggttaaagttcagattcatactgggcggacgcatcagattcgggttcacttcagcgcgttaggctatccattggtgggtgatcagctctatgatgggccgcttgatttagggataatgcgacaagcattgcacgcgtatcgactgcaatttcaagatccattcagtcaacaatcaatctcgattacagcaccgattgcagccgatatccaagcgattctacctacagaacgattaccaattgattgattcaaaggaagatgacaaatgaaaaaatggcaatggttactaatttgtatcttgtgtttcggcattggtggggttatcggtcatgtagcgactggtccaacaacggtgccatcgattattcagccaacttcggccaccgcaaaccagcccgttattttcgtaccggggagtaatggaacagttgaagggtttaatggcacctttgctaaattgaaccgtcaagccacacgccatgttttaaaagtaacggtattaaaaaatggtcacttgaaaaccagtggtcgctttgatcaaaaaacacaacaccccgtgattgtggttgcgtttgaaaacaatgcagatggtgatgagaacgtctttaaacaatccgaatggtttaaattggcagcaggcaaattagctaaacaataccactttacgcattttggtggggttggttattccaacggtgggcttgtattaacgcggtatgctgagcgtagtggaagtggaccgaagattacgcgattactgacgttgggaacgccatataatggcatgtcggagcacatcactcaggaaacaccgatgttagctgatttaaagagccgccggcaacatttatccaaagacttagtggtctattcagtcggcggcacaattaacgataagaatgatgggattgtcccagcagcgagtgttgcggctggtcggctcatttttcaaaagcaagttgctgattatatgacaatttcggtgagccagcaccatgcagcccatactgaattgccggataatccaaccgtcatttcactgattcaacaattgatgtttaaataaaaaaaggtgtgtcgcagcaagttgagctgtgacacactttttttaatactattgatcgattgttttcaagagattccgcgtgatgagcattcccatgatgaagattaaaatttctgttaatgggacactcacccaaacaccggttaatccgaaaaggctagaaagaaccaagacgctcgcaatcaaaacgatgtagccccgcatgatggccacgaaaaatgacaatcgaggttgcgcaatggcggtcatgaataagttattgacgatgttcatgcttgagaagaaaaaactaatgaaaatcaagggaatgccagcagacgcgtagcgaatcagttgttggttgtgttcatggttaaaaatttcgatgatcggtaatttaagaccaatcaaaacgagatataatcctaccgcaatcccgagtgcggaaagcaaaccgattttgagactcgttttgacattatcccaatgatgtttcccaaattcgcgactaacgattggctgaaccccgactgcaacaccgttgaatagggatagaccaactagtaagatgttggcgataatgccgtaagcggcgacggcatagttattactgagatggagaataacgatgttaaagacgaaaatgctgaccccagtactcatttcagttaagaaagatggaaacccgagttgaattgctttgaacgtcggttcaaaacgtaaggttaagtgctgcaaagttagtaaccgttgtgggtgatgtcggtgttgtgtcaaaatcagtaggctaacgattggcgaacaaatcgtggccatcgcagcacccatcatgcccatgtgtagggggaacattaagaggtaatcgaagataatgacgaataagctttgtgaaagcgtcgcaatcattgtcaaatgtggattactatcgttacgcacgaaacttaagactaagttattgatgataaataagggactgcctattaaaataattcgtaaataggtcaagcttggggcgagcgtttcatgattggcacccagtaagtggagtagtgggtgaataaaaattaagccaaatgccatgatgatgaggcctaataaaatcccaaaagaaagaacttgagtgaaaatcgagcgactcttttcgggatgcttgctcttgttaattgagaaaatcgtggcgcccccaatcccgagcatcagacctaaaccgttaaataagttaaaaatgggcagatcaatattcaaagcggccaagccaattggtccgactgcgtaagcgataaaatatgtgtccgctaaaatatagatggataagcctaacgagctgaaaacgtcgcggatgatgtagcccgttaattcttttttgatatgtggtgagttttccaaaataacactcctattcgattggtagtggggtcgccattaataacgcaataaatgattggattggtgctggtaaattcttccgggcgacaaggtagaattggcgttgatattgttgggacaatggtcgatagggaatttctgggtaatcaagtaaggctgcgctagaaactaatgattggccgataccctgtcttaatagttggataatcatcgcattgcttttgatggtcatcacgttttcgagtggtaaattattttctttgacgtaattcatcgtgtagtgatagacgccagaaccctgttcacgaagcaaccaaggttcattcgggcgacctgctaggaccagttgatcggtttgtagtggtgtccgaattaagtctttttcggttaatggtttttcaatgaaaccaaattctagtttgtgctgcgtcaattcttgaacaatctgcgatgagttgagtgtactgatatctaaggcgagtgtttcaagggctggccgatgcgctttaagcagggttggcaataagtaggttgcagtggtgtgcgaggcgccaattcggcacggtgtttttggctggccatcttgatgatggagtgcgtgcaaatcttggtcccataaatcaagaagttgttgtgcttgttggtagaagagatcagcactcttagtcggcgtcatctgctggcgcccattgcgttcaaatagtgtgacccccagcgcatcttccaattgtttaatttgcacagaaacggtcggctgcgatagaaaaagcagttgcgcagccgttgtaaaattcttggtttcataaacggttttaaaagttgttaaaattttaaacatatcatcacttctattcgttatcttaataacaactattataaagatttattttattaattgaaagagtttcggtatagtttaagataacaagtgagaaggagtaaagcaatggacaatataacaaaaaaaatacctggctttgcgttatcgttagcgattgcgattgccagttattacatcgctaaattatggttaccaatgttaggcggcgcaacgattgcgctttttgtcggcatcgtacttggcaatacttggttgcaacaaccggtattagcagccggaactaagttttccgagaaaaaattattggaatattcagtcatgttactgggtgcgacaattacattccaaagtattcaacaaatcggctggcatggtgtgctgtttaccgtattacaaatgagttgtacgattggatttgccatctggtttggccgccggttgcaatttagcgaaggtacctatttattgatggccggtgggaatgccgtttgtggctcgagtgcgattggggcaattgcgcccgtcatcgatgccgataacgaagataccggcattgcgattacattggtaaatctaatggggaccatcttgatgttactcttgccagttattggaacgttgatgtggggacataataatgaactccgtggcgtgttaattggtggaacagtgcagtcagttgggcaagtggttgccagtgcgacgatgattaaccaaggaacggttgtcacagcgaccttattcaaaattttacggatcatctgtttggtttttgttgtcagcggttttggttacttacatcaaaagaaacaaagtaaagtcagtgatacaaaactgagcgaacaattattagcgaagaagagtagcttagtgccatggtacgtgattggcttcctattattctgcgtcttaaatagcttacgggtttttccaagccaatttggtacactgtgccatttcttgagtacatggtgtgaaacaacggcgttagcagccattgggttacgcttgaacttaaaggcactcttcagccaaggtaaacgtttattagcatatgccggcggattagtgaccgtacaggtagtcctcgcgattttattaattacactattattctagggcgtgtcagcagctaggatgtttctaggaatattgaattattaaaaaatctgccatcaacaattttgttgatggcagatttttttgttattaagcttggtaagtgccgacttgaacggcttgttttaaagtggctggtgtgtgatgtgacttggcgaaaaattcgcttaaatcacgtccggctgttaaacctttaaaatgtttgccgccttgccaaggggcgattgcggaaaggtcataaacgacgccatcaacggcaacgtatgcgggttgaccatcttgaccgttatattgagcgagtgtttcttttgtaaagactttatctgtcatgattaaaaatctccttcgaattgtgaatgggttaccaataatatagcgctagatgcagaagttggcaacgattaagttgtgcactttgaaaatgaataatgttgaggctagcgaattagagaattattcgtgaccttaaatactgttcttcaaataataatttgttaaaataatcataattgggggggatgaaaatggacaataaaaaagactggttgatgcgacaagttgattcttttgcggaaggaatgggttatttgttatcgaaacaaagtggtaattcacagtcggaggttgtctttccacaagaaaatgctaaaaaattgccttttcaaagggaattggcaagtttaattgctgccaacgatactagaggggccgcccaacgattattaaaattacaatacgcaatgcctgaagaacaatttctacagttaggtacatggttattattagaaatgaagcaggacagttttcctaatcctttaacccgtgaagcgctgacagacgttttaaatacgattaattaaataattgaacgaaaaaaccaccctaataaataatagggtggttttatttaatattgatggacccgaccagattcgaactggcgacctcctacatgcgaagcaggcgctctcccaactgagctacgggcccaaacgcttacaaaaatattttagcacttttagctaaaatagcaaggcgaattagtgacgggcagatgttctgaggttatttgcttttttgccacctttaatcgtgcgggttttgaagtgggcttgttggctatcaggaacgaacttgaagtgttgcattttcccggcatatggttggccactgaggcgaatcttcaaccaatcttgcatggcttcaatcattccagtcagtttttcggcttgttcagaatttgcttgtttttggacttcggttgtaacatcgttagtgagataagccaataatttttgatgataggcaattagttcttctgtgagtggcgcttggttatattgattgaaaagtttttgaacaaaacgcattgcatctttagcgttttgtggttggtaaaagcgatcttgatcagacatagaatttccctctttcttcagagtagtataacgaataatagtgctcgtcacaaccgtgtgctttggtataatagagaaatactagtttttcggaggtcagcaatgtttaaacgtaaaagtgattggttcttagtggctgcactggtgatgatggcgatcttattttacagttcttcaatgacgtatcatgaacaaacatcggtgcccactttggaacgatttctcaagaatgaaccacttaaggcttggttaagtcaattttcgttccattatgcaggcagtgaacagagtgtaaaagcatctgggtatttcaaatttgtggagtttttcgtgcgaaaaggcgcccattttgggacgtatttcttattggcggcttttagttatttagggctacggccacgcgtaaccggtggttttttagcagttatctttagttggctggcagcaaccgggtatgcggccacggacgaatttcaccaaatgttgactggtgatcggacgccactttttcaagatgtgatgttggacagtgttggcgcattaacggggattgtgattgtttgcgcactacagtggatttttacacaaaaaaagagacgatagcccgactatcattgcttttagcatggtaatttgctatcatagaaaacgacttagtaccagaattctataatcgaaaagaggagttagatatgtcaggacattcaaaatggcataatattcagggtcgtaaaaacgcacaagatgcaaaacgcggcaagattttccaaaaactatcccgtgagcttttcatggctgcgagaagtggcggtcctgacccaagttctaacgccgcattacgtttaattatggataaagcacgttcagctaacatgcctaaagataatatcaaacgggcaattgataaagctgacggtagcgatggcgcgaactacgatgaaattacttatgaaggctatgcaccaggtggtgttgccgttttagtacacgctttaactgacaataagaaccggacaagttcagacgttcgtgttgcatttactcgtaatggcgggacaatgggtgcttctggctcagttgcttacatgtttgatcgtcgtggttacattgcgattgcacgtgaaggattagatgttgatgaagatcaaatgtttgaagacattctagaagctggcgcggatgatttacaaactgaagaagacgtgtttgaaatttacacagatcctaaggaattagcaaatgtccgtgatattcttgaaaagaaatacacattggcaaatgctgaattaacaatgattccacaaaatacaacaccggttgatcctgaaaaagcagaacaattccaacgtttaattgatgctttggaagacaacgatgatgttcaagaagtttatacagctggcgaactaccagaagaagactaatttgtttgataagtgcgttgcaagtaattgcaacgcactttttttgtgcagaaaattatccggttatttgcgtatctttggttagtcaggaaggagggacgagatgaccgaagtattaacaacccttttgcaaaagtgcgcaacggaaaaagcgcaggatctttattttcgaccactatcgacgggttgggcaattattgaacgcttagcgacaggactaaagccgttacaaaaagttactctgtcagaaggcaatcaatggctcaatcaaatgaagtatcaaggggggatggatatcagtgaaactcggcgtccacagaccggccgttcagcgatcgaggtggcaggcgaattgatttatttacggttggcaaccgtgggggattttttgaatcgggaaagtttagttgttcgtttcatttatcccattgggcagacttatcattgcgacgactcgcagattttaagtcgtttaatgcagttaattcagcaaccaggattattgctatttgccggtccaactggttcagggaagacaacaagtttgtactatcttgcggaacaagtcatgcaagataagatggtggttgcgattgaagatccgatagagattcaacagccagctttcttacagttacaggtgaatgaagccgcagggttaacctatgcagcattgttgaaaatcagtttgcgattacggcctgataccttaattattggtgagattcgcgacttacagacggcccaacacgcggtttctgcggcgttgagcggtcacttggtactaagtacgattcacgcgcgaagtacaacgggggtgatggaccgtctattagatcttggaattagccactcacaattaaccgcttgtttagcgggtgttgcctatcaatcactagtggtcgaaggccacaatgtagcggcccactatgagttagcaactgcacaacaattggaggaggctgttcatgaagactaaaaccactgttcaattcaatactgaatttatgttgctgttagggcgcttactgcaaaatggtttttctttacaacaagcgcttgagttcatgccgattgtttttccgacacaaaagcagtggctgcatcaggtgcaaactgggttagaagcaggaaaacgactagcaccaagcttagcggcggtttcgtttccaacacaccttgttgcacagattgaattgactgagttgcagggaaacttaggcgagtgtttgttacatcttggccaattacagcgaattcaacagaaacggcgtagagagttagttggcgtaattgcctatccctgttttctactcctttttctcggggcgttgattgggatgatgcagatttatctttttccggaaatcgcgcagtttaacccaacaacttcggcgacatcaccattacaactattttttagagtgatggggacattcgttattatggctggtggtctgattagtgtgtatttattccgttggcatcggcgaccgctattacaacgattggcggcggcatttagatggccgttcatcggtaaaacgttgcaggcttactatcagtattgcttattatttgatttagcgacttgcctgaataacggcttaaacttggccgaaatgcatcagcttacacatcgtttggcgaaaacatcgtggcttgtacaattaatgcaacaacttgaaacggctgtccaaaaggggggcacgctattagcgaacttagcggatggcgttttttatccacctgagctgcaattagtgctcgctaagggaagtccgttacaacagatggccaaggaggttgatctgcttgcagtcattaaatacgatgaactgcaacggcaattgaaacagaaggtgaattggctacaaccgctcttgtttatcctaattgggatcatcattatttgtacctatctcagtattttattaccgctatatcatacaatggagggaatttcatgaagaagaaaagaaatgcatttacattgatcgaaatggtcgttgtgctagctgtgatagcaatgttagtcttgttaattgcacctaatttaatgcatcagaaagagacagctgagcaaaaaacggatacggctctagtggcaacgattcaaacacaagttgaattagctgaggatgacggtaaaacggtgtcgagtctagccgatttagcatcaggtgaaaaatatttaaccaataatcaggttaaacaagctgaaaaacgcggcataacaattaaggataataaagttgttcaaaatacaaaataaggcgttcactttaatcgagagctgtcttgttttgttcattgttggagtagtcagtttatttgcgttgcaacatattcgagattatcgtgcacggcaggcggagcgtttattttttgaacaatttgaagcgtcttggcatgcgactcgcgaatatgtcgctgttgagccgcataatgtgcacttatcttgggatcaaaccaaccacacgttgcattacacaagtgcggatccacaataccaaagtatggatatcccgattccagaaacattgatgtgcgtcgatccagaaacatggtttaggattcaatttaatcatgactcagctgctagaccgcggtcattgatttgtcggtctaaaattgatgggcaccgttatgaatatcgggtccagatgatgtgggggatgttacatgttaagaagtagaccggcatttctattaatagaacaaatcgtggcgttaagtcttctcctgatgggaggcttgaccttgacaatgagtctacggcagtttaaagcacatcaagttcaacggcggtgtgctgctacagaatatgctgtaatggcaatggctgccaatcgattggcaaatgagcagccgccacaagcacaatggcagttgcaacgggaaacataccaagtcgtcaccaaaaaacaggccatttatgtcacaaataaagcgggtgagcgagttgcacttcaatggtattgttactaaacgctctggatttacactgattgaaatggttgtagctctcgttattctgatattgagcagtcaattaatattggcaaccactaaaacactaacgcacacaacgcaattaacccagatggaacgtcagaatattaattggcacattagtatgattgaacttgatcgttttctggatgacgctcaatttatttcaattgaacaggcgaattatgaacagcaattaaccgtcgctaaagattcgaaacgacgctataccttaacgaaaactaagaaggaactggtggtttcgagtacgaagaatggttatatgcctctgtttgatggggtctcgcggttaaaaatggtgtatcatgaaccttttttagaactcgaagcgcgcttaagcgatgggacagcctatcaacatgaatgttttttggaggcgcaacatgacacgaaaaatacagattaaacgctctgcagtcgcgctcttgaatgcagttttgatgttgagcttggtgacaagtgcgttgttgattgtgacccacagttaccaacagcaacaacagagttacgtcagtttgactaactattaccaaacgcaaatcttgcttaaattaacaaataaagcgcggcaaactcagtcaattcaaggtataaagactaacatcggtaagagtcgtatcgaccagcaacacaagttaatcatcattgagttaaacaatggttatcgaaaacagtttccagatcagaatgaaacagatcaaggataaattttctatttgataaagcgcttactatgatttataattctaggtatacccacctgtattacttgctttgccgttagaataccgatagaatataacaggaatctaatgaatagaggtggctattttgcctaagagtgctgtagaaacgttgtttgatcaactcgatcaaacaacacaattaattgaaaagaatttagaaacaacctatttggatgcactcaccgagaccattgctaatattgcagatggtggccgcgtaaaggttgaagacggcttaccagatgctgccactgttgcacaactagaaccgctttatgcggcggttaatctcaaccaatttgaagcagaagaaattcgccaagcattacagttggcaacgctcaagggtttgcgtcaagttaaagtggaaccaaacaagcaaatgacaccagatgcgatcggctatcttgtagcttatttggcagaggtttttggtggtgctgaccaaatcaagacaattttggacccagttgttggaacggggaacctattggcaaccgtaatcaatcatatccaaaaactaacggggaataccgtgcaaggttttggggttgataatgatgatagtttgttggaaattgcgggcatcagtagtgaattgcagaagcattcaacaacctttttccatcaggatgcgattgaaccgctactggttaaaccagttgatatcgccgttgcggatctaccaattggtttttatccattagatgaacgggcggctgattttgaaacccacgctgccagtggtcattcatatgcacatcacttgttgattgaacaaacgatgcattatgtgaaagaaggcggctatggctttttcctagtaccaaatgtgattttggaaacggatgaagctaagcaactgattaaatgggtgacaaaacatgtctatttgcaaggcttattgagtttaccagcaaacttgtttaagactaaggaaggtcaaaaagcaattttagtccttcaaaaacaaggtgccggggctaaacaagtggaccaaattttattaggtgaatttccaaattctaacgatcaaaaggcgtttgcaacgtatctacagaagatccggacttggcataaagataatttacaataatcgaatagaaaaggtgattagatgtcaaaagtattagcaattaacgctggtagttctacccttaaatggaagttatttatcatgcctgaagaacaagttgtcgcacaagggatggttgatcgtttaggattatccgattcagtctttaccgttaaatacggggatggtcaaaaattctcaatgacccaggatattaagacgcaagatgttgcggttgatttgttattgaagaagttaatcgaatttaaaatcatcaatgaatatagtgaaattagtgggattggtcatcgggtcgttgccggtggggaagactttaagtcatccgcattaattgatgaagcgtcattaaaacggattgaagaattgtcagaatacgcaccattacacaatcctgctgaagcaggtgttatccgtgctttccgcaagattttacatgatgtaccacaggttgctgtttttgatacatctttccatacaacgatgcctgaagaaaattatctttacagtttgccgttggaatattatcacaagtatggagcacgaaaatacggtgcccacgggactagtcatcggtatgtttcccaccgtgctgctgaaatgttaggcaaaccattggaagaattaaagatgattaccatgcatcttggtagtggtgtttcagtgactgctattaaagacggtaaatcgttggatacatccatgggctttacaccacttgcaggagtgacaatgagtacgcgttcaggggacattgacgcatcactcgttgcatttttaatggaaaaattaaacattaaagatccagcagaaatgatcgatattttgaatactaaatcaggtatttatgggatttctggattatctcctgatatgcgcgatcttgaaaaaacgcgtgaagaacgtccagaatcacaattggcaattgatatcttcgtcaatcgtttaatcaagtatgttggttcatacgttgccattatgggtggtcttgatgtcctagtgattacagccggaatgggtgaaggtgacatcttaatgcgccaacgcatcgccgatcgcttgagtttctttggcgttaaagttgatccagaacgcaataacgtgatggctcaagaacgcgtcatcagcgctgacgattctcgcgttaaagtattattagtaccaactaatgaagaagtaatgattgccagagacgttgttgaaattggccacgtctaaggcatcagtgaaaatgaccagcgcatggctggtcattttttagtggagggaatgggaatatgacaggttttacattattttatggcttattggcaattgccttgctcattatctggctgattgttgaaacgaaaatggtttggcgtgcaaaacggaatcgactatggacgatttttttatgttgtgctggaatcctcttactaggtttaacgttagtgatgggcaaaacgctcagcgatcaaatcacaggtatcggctctgttgtaattttaattgtgattgctttttggcctcgtggtttaaccaaaacaagtttgattgcaaacttaaatactattcatcaatttgcagcgatttctaagattgaattactaacacaaggtgacttagtcgaagcttgtttttatgtcggtgaaattcggattgccaagttgcgctttaaaacgacggtagaaaaattacaaacctttttaaaagaccggtttcctaagaaacgcttagtggtgaaatagggttaaagtctttcatattactggctgatatgctaaactagtatttgcatatcggggccgttacggattcgacatgtgtaggtgagcgtgagttgcacttcgtaggttacgtctacgttaacaacgttacagttaattataactgcaaacaataacaattcttacgctgtagctgcctaaacaccagcatagcgtgatccgcctgacttcacccaagggttagatccgggtctcaaattaattgggttacgttaaacgctgccgtttgaggtgtttaaaagagatttgcaaactagctagttcatccgagcttctgtcggacggcgttttggactagcgaactcctaaatcgttcgactatgagtgtagagattgacgtggcaatgcgcatggacgcgggttcaacccccgccggctccattagataacaaggtgttaagcagaattaggcgcttaacaaaaggcgattaacactaccgtaacggtgttaatcgccttttttgtttgcaaaaaaataacagccacacgtgtgactgttacattaattgcttatgcccaacggtttgtttttgttggtaagagcattaggatatagaaccaaattgtcccgataagcggtatgaattcaatgagtacccaccagcctgagcggtctgtatcgtgaagtcggcgcattttaacggataaagttgcaatccaaacaatgaagacgacgatgttacgacccattgagatgcctaaatccccaatattatagatttctgaaattggatggccggttattgtttgaataataccgatgataataccacctagaatgtagttaatgatgattggccaccagaaatcaggtcggtttgaagtgcctgagaaatcaaaaatccgggaccaaaaactttgatatgatttaaccatgatgtaaaacccccttctccttatcagcttttcgcatcgtcagttctggacgagatgagaagttatgataaatttaataacttcctaccaaagatattatgacatacttaaacgagttttttacagtttttagcttacatagagaatcaataatttattcgccaacgcccattaatgaagcaagaatgaataataaccaaatgtgaattgggtagaacaagtagaagaaatacttcatgctacgtcctttttgtccgttgtacaagaggattgggataatcgcgaagatcatcatccattgcgtattgctagtgaagagtccagtgaaggcaaatccggagttgattccagcgtcaaggaatgcgaaaacaagaacggtaagacattgtaagagccggttgtttcggaaaagataaaaaaatactcctatgtagaggagaaggccattttccgcaagcataatggttggaataaccattgcgagattggcagcaaacatcattgtcttagggttagcaattagaccaagcgccaataatgataagaggataggagcaataattgccagtccaccaagcaaaatttgtttggaatggtgcgtgcggcgaccgacactaatttcttgaatcccatacattgctaaaacggcaatgtataaatcggtaaaaatattgtttgacagtgcgaggttaccgacttcgaagaagtgttggacaatggggcttcccaagttcataatccaaaaaccaacgagtaattggaacatgtaacgtttttgattccgcgtatgtatgaatccttcaactgccataaagaagaagatggtggcaactggtcgtccgaaccaatcaacccagccagggaccccagctccggcgaacatttggtgcacgtgatcaataaacatgaggataattccaattaccttgacgtcgaagttatttaaaacttgatatgatttagtctgcataatagcctccctaaaagttaagtaagtacattatctgttactccaaattaaccagcgaccgcttaaaatactcgactggcaaacaccgtatcaggttatgctgacaaatttgtccgaaaattcggattaaatttgcaatctaccattcattaaatccttgttaccagtaattaatgcggcacctgcatcactcgccgctttttgagcagccgcttgcgcctctaattctttcttgaacttcgtttgtagttgcgttaattggtcgttagcttattgtttttgttgatctaagtccttaattgcagcatcattttcctgtgataatgataccagcttggcctgttgcgcttctaattcagtcttttgttcagctttttttcagctaatgaggccgtttcagcggcattatccgccttagcgtctaacagtcgattgatgattgaacctttttggaataaatcgctcaaactttggctcgacaataaactatcgatcatatcaagattaaaactgctatctcgtgtttgtaattgccgcaggttaccttcaataatcgccacttgcttttgataatcagcagatgttttgctgaactcgtcttgtttttctttaatatccgcctgttttgcagtcatttgttcgttcaattgcgttgtttttaacgttaaattactaatattattattcaattcggatagatgatcttgtgctgtcttaatggcagtttgcgtttcttcaggcgttgcttggaccgtttgtggtcgcgctaaaaagaagccacctaacattaaacaggttatcagtatccgccggtttcgaaaaatcattgtcaacacctccaactattattataccgcaatcaaaattaattaatagggttgcgcacaatttatatatgcgcattttttttgaaaaataaaaaagttccaaaacttttgccagttttggaactttggatttaatcgtgctttttggttataacgacttccgcttaactacaaaacgagcgttatggcaaaaaccgccataacgctcgtttttaggttaatgctcagaaccaacccgtttcaaacgcacttctttacatcataccgcccattgctgatgggtccatgcctgctgctggtgctgggttgtcttctggtttgtcagcaaccactgcttcagttgttaacattaaggccgccacactagctgcattttgtaatgctgaacgtgtcaccttagttggatctaagatgccggcttcaatcatattttcccagttgccgttggctgcattgtagccgacttcaactggttgtgatttaactttttcaacaattactgagccttcaagaccagcgttggttgcgatttgacgaacaggttcttccaatgcacgaagcacaatgttaatcccggtttgaacgtcgccttcttctttaagcgcagcaacactttcgatcacatcgattaatgctgtcccaccgccggcaacgtagccttcttcaacagctgcacgcgttgcgttcaaagcatcttcaatccgatatttttgttctttcaattctgtttctgtggcagcaccgactttaatcactgcaacgccaccagctaatttagccaagcgttcttgtaatttttcacggtcaaagtctgatgttgtttcagcaatttgtttcttgatgttttcaacccgttcagcgatggtatctttgctaccagcaccttcaacgattgttgtatcatcttttgtaacagttaccttaccagctgtccctaattgatcgatagttgtttctttcaattctagaccgaggtcacttgtaatcactgtggcacctgttaatgtggcgatatcttctaattgttccttacgacgatcaccaaaaccaggggcttttacagcaaccacgttgaatgtcccacgaatcttgttcaagacaagtgttggtaatgcttcgccatcaacatcatcagcgatgattaacaaggctttaccttcttgcacgattgattgtaaaagtggtaaaacatcttgaatatttgaaatctttttatctgtaattaagatatatgggttatctaggtcagcttccatcttatcgttatccgttaccatgtattgtgacaagtaaccacgatcgaattgcatcccttcaacaacgcttaattcagtatcaatcccttttgattcttcaactgtgatgaccccatcgttgccaactttttccattgcatcagcaattaaacgaccagtttcttcgttagctgatgaaacagcagccacttgggcaatggcatctttactttcgactttgtgtgaaatttcgtgtaacttcttaacagcttctttagttgctaattcaatcccacgacgaatcccaactgggttagcgccggctgtgacgttcttcatcccttcacgaataattgcttgagctaaaacagtagcagtagttgtcccatcaccagcgatgtcattcgtttttgaagccacttcagaaactaacttagcacccatattttcaaaatgatcttctaattcgattgctttagcaattgtcacaccatcattagtaatttctggtgaaccgtaagctttttccaaaacaacgttccggccttttggtcctaatgttgttttcactgtgttggctaattggtcaacccctgccaacatttttgaacgtgcgtcttctgaaaatttaagttcttttgccataatttattcacctcaaaaaatttttttgtttattattattcaacaatagccataatatctttagcatggagcactaaatattgttgaccttcatattcaacttctgaacctgcatatttatcgtaaataacttcattgttttctttaatatcaagtggaattcgtttgccgtcacttgttaatgtgccggtaccaactgcgactactttaccggtttgtggtttttgtttagcattacttgccaaaacaatcccacctactgtttgttcttcttcgtctttaacggcgataatcacgcgatcttctaatggttttaacacttaaaatccctccatcaattttacttttttagcactctatcatctcaagtgctaatcacaatttttatcatagcattttttcagaacattgcaagtattatgctagcacttttgcaatttgaatgctaatacgctaagctattgtcacaacaacctttgaggagctttcacatgacgctatacaaacaaaatttttcaattatcattagctatttgttcattttattgattcctagtgcagtcgtccgttttggtcatctatctgcctcgttttttctaatcacaaccattgttgattgcctcggtgccgcctggttactctatcttaatcaacgcacacaagccaatgccattgagcagcggcctttcccactcaaacccattatcatttgggggttgtgtggcattgtactggtcttagtaattcagattctcgccggcttcattgaacaaaacattctccacatcactgccaaatcgctcaacaccatttcactgatgaccatgatgcaacaacaaccgtttcttattttagcaacgaccatcgccgcaccgattatggaagaaatcacgtttcgcaaagcaatctttggtggattagccagtcgcttaaaccgcattttagccgccatcatttcaagtttactgtttgcttttttacatcaggacgggcatttgttaatctacacggccatcggtcttttcctatgttggctgtaccgcaagacaggttcgattttcaccacaatcatcagccatgctgggatgaacctgatcgtcactttactgtatctcaatcgttaaaaaaagcgttcaaacaggcggctactacgagcaacttgtttaaacgctatttttattcttgattttgttcatcagtataattatcgaggaagtaaatcaaagtttgtagttctttagccaaatcaacattttgaatccgcacgtttgatggcacagaaattcgaattggcgtaaagttcataatccctttaatcccagcggccactaattcatcggtgacttcttgagcttcatcaattggcactgttaaaatgacaatctcgatctgttggttcttcaattgttcggccatctcgtccattgaatagacaggaacaccggtttgaattgttccaatcatttcgggtttaacatcaaatgctgcgctaatccgaatattattggtttgcttaaagttgtagttcaataaggcgtggcctaaattccccaccccaatcaatgcaacgtttgtcaatcgatcttggttcaaggtcttcttgaaaaaatctagcaacgaagcgacatcatagccataaccacgtttgcccagtgcaccgaaatatgaaaaatcacgacgaattgtcgcactatctactttaactgcttcagataatccagtagaggaaattttagttttccctgaattgttcaaaaagtttaaatagcggtaatataaaggcaatcgttttgcagttgctcttgggatattattctcaaccatttgaaacctcctttttgatttgcttgtgaaaatagtgtagtaccatactgaaatcatactgaattttcttgtgaaaagcaatatatttacaattttgactgtccatcgtttaaatctgttatgatagttgacagtagtattataaaaatgaacgcaattaactttaaaaaacaccgcacgaaaggatttttagccgtgatattattacaagttcaacaagtcgcacgcagttttggcggcgattaccttttcaaaaacgcacaactcgaagtacaagaccgcgcccgtgttgccctcgttggtccaaacggggctggtaaatcaaccttattaaaaatgattgccggcatcacaacgcctgatgaaggccaaatcattcttagcaaaaatgctcaagtcggttacttagcgcaagatagtggcttagactcaacccggacaatctatgcggagatgttaaccattttcgatgatctccgccaaatggaagcccaaatgcatgaactcgagaccgcaattgcggacacaaccattgaccatgctagcgaagaatatgcagccttactaaaacgatatgaccaagtccaacacgatttctctgaagctaatggttacggctatgaagccgaaatccgtggcgtcttacatggtttccaatttccagaagacacctttgaaaagccaatcagtacactatcgggaggcgaacgctcgcgactcgcacttgctaagttattgcttgagaaaaaagacgtccttattttggacgaaccaacgaaccatttagatatcgaaacactaacatggttggaaaattatttacaaacttatcccggtgccttgctcaccgtctcacatgaccggtacttcttagataaaatcactaaagaagtctacgacatgagtcgccacacattgacccattataccggtaattacagccatttcttaagtttaaaagaagctaacctctcactcgaatggaaggcttatgaaaaacaacaagctgaaatcgataaacttcagacctttgttgataaaaacttagtgcgcgcaagtaccacgaaacaagcccaaagtcgccgccgtcaactcgaaaagatggataaattagaccggccgcaaaacgaagccggtaaaattcattttcatttcgaaagcgaacatccaagcggtaacgaagtattgcaagtaagcgatgccgctgtcggctattcccccgataaaatcatggtacaaccaatcaattttgaagtgaaccgccacgaacgcttagccatcatcggacctaacggaattggtaaatcgacccttctcaaaagtatcttgcaccaaattccgttcatcaaaggccatgaaaaagtcggtagtaacgtttcaatgggctactacgatcaagagcaacgcaatttacacactaacaaaaccgtcctcaacgaattatgggatgaacaccatacaacacctgaaaaggaaattcgcacactacttggtagtttcttattcaccggtgacgatgttttaaaggttgtgtcacaactcagtggtggtgaaaaagcccgcttactcttgacgaaactcgcgatgaaccatgacaatttcttaatcatggatgaaccaacgaaccatttggacattgatagcaaggaagtcttggaaaaagccctccgtgaattcgatggcaccgtcctcttcatttcccatgaccggtatttcatcaatcaagtcgccactggcattatcgaactatcagatactggtagcaaacgatacctcggtgattacgattactacctcgccaagaaagctgaagaaacagcttacgcagaagcagctagccaaaacagtgcaattatccaaccaagtgccaatgcactagatgcctacaaagcaagtaaggaaaaccaacgtgcacaacggaaactagaacgcgaagttactgctttagaagaaaaaatggccgcactagagactaaggccaacgcaatccaagaacaaatgacccaagcagacgtaattactaaacccctcatgcttcaagaactacaacaagacctagaaaaagtccaagctgaactcgctcaaacagaatcagactgggaagaacaagcgatggcactagaagaactaacacaatagagtgcgtcaaaagccggttatgctgcgagcatcagcctaacaaggcgaatgcttgctacaagcaatcgtttgacttgtgtagctaagcacagaaatatgcctgcaccacataaaaaagggtagcgatcaatatcgttgcccttttgcattttaattaatttgtttgccgaacggacttaacgataacgccgctagcttaaagtgttgccggccaaatggaatcccaataatcgtaattgataataatagcccccaaaagacatggctcgcccacatcacaagaccacctaagaaaaaccaaacaatgtttaataaaaacgaacctgcaccccccgttgaaacaacggttgcgttaaacggcatcaaggtcaatgcgccaatcttaaaacattgtagcccgactggaattccaataatcgtaatactccaggcaatccccagaataaaccaaccgatagcctctactaatcccccgaatagccaccaaattaatgtaccaattaaactcattgaataaactcctttatacttgattaccttaattatacctgattcataaacaaaaaaagcggtagccgcctaaaaataggtcgctaccgcttttcttaatctttttttaaccgattaatgctaacgcttgtttcaagacagtttcgccgtccatcatgccgtaagccttcatatcaattacttcaacaccgattccttttggtgccaatttttctttaaattgaccttccatgaaacgaacttgagggcctaatagtacgcagtcaatttttttagattcgagttggttgtctgcatctgaagcgccagttgcaaaaatttctgcgtctaaaccttgtgcttcagcggccttttgcatctttgaaactaataaacttgttgacatccctgctgcacaacataacatgattgttttttctgccataatgaattaccccttaaattttaattggttagaaagcgataaaaggcttataaaaagcgttttcatttcctctatgtttttagtataagcgctttctttattaatgtcaattaatgttatttaaaaatatataagccgcccattttgttgacctatcccaatcattaacctgtcacctgttattttatcgcatgaaaagtattttttatgctccctactaaacacaaaaaactgctaaccaatgcctaaaaatcgtcggttagcagcttttagctattttattgtttagtatagaatcgttttaattttgtctggcaacgcgattgtgcccgtttcatctgttcaaacgtgcaatctagctggctacacgcttgctcaactgctagttgccccgtcaaaacccgaaaggccactaactctaaagcagatagtgtctctaagtacgcccgcatttcaaccgttgactgatagtatgccacggtatcttcagcgagcgcattgcattccggacaacaatcaaataacagggcttgctgatcgacccgtcgtttctgagcaagttctttgcgaatcaagtttaatacgtggtggtgaaagcgtaatttataaaaaccaccaaaacttttgccgcaattttgatcataacactggcaagtctcataacagacgattcgcgcttcttgtaaccaatcgtcctcatcaaataagcgaatataatatggagtaaaggtgcgataaaccattggtaggtaggctttaaataaaacatccaacgcctcagaatcgttttcaaccaccgcttgaattaagtttgcatcacgttttgctaattccatcaatgaaccacctctcacgcaaccccacgcctttatcttaacaagttatcgtacatttattaagagaacgtttgtttaatcatctttttcagcacttagtgcatctcgcacctgtgcaagttgatctagttgcgccggattccacggcatattccgttgcaaggtccgatcatgataatgcttggcatcatggtcaatttcacggtgcgttcggcgaatctcacgataaaaatcgtgcgaagacacccgcaatgcgccccgtgaaaaaatcgtccactgctcagcttgatcactcgaaaccaccgtcacttgcgtaatcggcgacattaatttacccgctaagccttcgatataactgtccgctgtttcatcctcatcggtgaagacaacttccaaattatactgcacataactttgtttaatccctggcacatacattgcatcaaatactaagatgacttcaatctcacgaaacttgcgatattctgataatatctgcaataagcgatcacgcgcatccgcgagatgatcattttgtttcaacttattcagctcgggccagttcccaatgatattataaccatctgcaattaagatctgttttttcatctgctataccaaaggttgacggctattataagcctgatacattaaaacccccgcagcaacactcgcatttaaactttgcacatgaccgaccattggaatcgtcaacgtttgatcaacttcttttttaacaattggtgaaagccccttgccttcattaccaatgattaagccgattggtcctttagcatcccacttacgatagtcggtaccagccatatcggtgccaaaaatccaaagaccacggtccttcaatttcttaatttcttgtgttaagttcgtgacacgcgccactaggatatgttcgatcgcaccagtcgatgtcttagcaactgttgatgttaaccccaccgcacgatgcttaggaataataatcccatgcacaccaaccgcatcagctgtccgcatgattgaacccaagttgtggggatcttccaagttatccaagattaagataaacggttcttcttctcgggctttggccttagcgaaaatatcatcaacactcgcatattcaaacggtgcgattgctaagataatcccttggtgattttgacggtcactcaataagtccaacttatttttaggcacattttgaatgattagacgtttttctttcgctaatttcacaacatcgtggacaaagtcagccttcaagccatcttgtaagaaaattttattgattttcttcgcatcactggtcttcaatgtttctaaagaagcgtgttttccgatgacgaaatcagtttgttcttcaacaactgcttcttcgacgggtgctgctggtttcttgttagctggacggcgcgttggctttgccgaattattggccgtccgacgactattgaattcgttgttcttttgtttgaatggttggttattattttttctcatgggtcctcccagcgtcgacttgttgaatacaccagtgggctaattcagcgacgcgctcttgttgttcagttaagtatagatagccaaaaactgcttcaaagcccgttgaggtccgataagtcgaaacactcgtattcttggctttcgtataacttttggcatttctaccgcgtttaaaaatattcatttcttcttctgttaaataattatcatcgatcatcaaaccaatcaaagcagcttgcgctttagccgacacataatgtgtcgccacttgttgcaagcgcgttggtttggttaaaccgagttctagcaaatgggcgcggacatacacttcgtaggctgaatcgcccatatatgccaacgcaatcccgtttagttgtaaagcatttttcatgcgcgtctccatctcattccttgtggtgtatcttccaaaataatcccttgttctttcaattgatcgcgaatcgcatcactgcgggcaaaatcctttgctgcccgtgcagctttgcgttcttcaatcaagctttcgacctctgcgtccaacagttgggccgccttaaactcaacaccaaaaatggctaacaagcgcgttagacgggcagttaaatccactaacgtaccagcttggacggtagcccgttccaggtattgattactaagcttagcgagttcatacaattctgttaacccgttttgcacgttaaaatcatcatccatcgctgtcacaaaggcgtcttccaagcttgccgcttgtgcggcaatgtctgcgtctgcacccgcttcagcagtcgcttggcggaacgctaagttatcgagggtcgtttttaaacgatccaggttcgtttgcgcttcagctaataatgattcactgtagcgaattggtcggcgatattgcgtgctactcatcaagaaacgtaatgcttgtggattaacttcttgaatcaaatcatgcaccgtcacgaagttgccaagagacttactcattttttgatcatcatccccgactgtcacaaagccattgtgcaaccaatagttgacgaaatgtttaccagtcttcgcttcactttgagcaatttcattttcatgatgtgggaactctaaatcttggccaccgccatgaatatcaatcgtgtcgcctaaatatttggtcgacatgactgaacattcgatatgccagcctggtcgccccttaccccaaggtgaatcccaagcaatatcggtccctttttctgacttccaaagggcaaagtcgattggatcttccttacgtagggtttcttcggttgctgtatgttcgctggccccttgttcgagctgatcgatatcttgaccagctagatggccatagtccttaaatttacgagcacgatagtaaacatcgccatcaacggcataggcataatctttagcaattaagtcttgaatgaacgcgataatttctggaatgttttctgtcgcccgcggattgagtgtcgctgtttcaatattaagtgcttgggtgtcttctttaaaagcggtgatatagcgttcagctaattccggaaccgtgatttgttccgcattcgcagccttaatcatcttgtcgtcaacatcggtaaaatttgagacataatcgacttgatagccacggtattcgagatagcggcgaatcgtatcaaaggcaatcgcactgcgcgcattaccaatatgaatatagttatacacagttggtccacagacatacattttaacgcggtctgcttgaatcggtttgaagacttctttttgacgcgtgagggtattataaacggttaacatcgaatcttcctttcttaaacgtgctcttgcaggcttatttctgcgcttaaccaaatttgcccaatcggcgattgcatcgccaattcgtcaaatccagttaatgctcaaaatataaccacctgctgtcgcactcttcttctaaacgtgctttttgaaactgacttctgtgctttgctccataccgcaaacgatcgccagtggcgctccctcacggtattaggcaaatgctcgaagtcaaaccgtttcaaacgcactcttccaaataaaaagcgtcctttgttggttaacaaaagacgccgattgagcgtggttccacttttctttgcaaaaatgccttgaacaggtaacggtgtcccggctaagtcacaaagtcacttggcatttcagaggtgcatttcgatggggcaatcggctttcttccagcaattcgaaagctctcttaacaattggcatcatctacttattctcttcatcaattttaacggtttagttggtctccatgatacagattattgacgaccgtgtaaagtgttctgcgtggctatttttctttcaagcctttttgttgatgcgctggtctagcaaaaatcatccgccccgcagcggtttgaagcgcacttgtcacaatcacttctagcggtttatttaagtaatgttggccatcttcaacaacgatcatcgtgccatcatcaagataggcaaccccttgttgccgttctgttccggctttcaccaccgtcacggtcatcgcttctccaggtaaaactgcaggcttcaacgtattggcgagttgattgatattgaagaccggtacgttttgaaattcacagaccttgttcaagttataatcattcgtcacgacaatcccatcaagtaattttgccaatttaacgagtttactatcgacttccgttaaatcctcgaaatcaccgtcgtacatttcaacagataagctatcgtctttttgaatatcgtttaagatatccagtccacggcgcccacgtgcccgcttcaaattatcagcggaatctgaaattaattgtagttcatgtaagacaaagtttggcaccatcaatgtgccttcgataaagcccgtcttagcaatttcttttattcggccgtcaataatcacacttgtatctagaatcttatacttacggaaattatcgccgactttacgttctaatacatcagcattgcgtttcttaggttgcatcaaacggcgccattcttccattcgcgttgtcccaattcgaaagccgagataccctaaagcaatcatcaataaaatgggtacaactgtatttaatgcaaaaatgggcatccggtatagcggaatcgaaacaacgtttgctaatagcaatccaattagtgaaaaaacactcccaaataaaataaaactaggtgattgtttcgttaaggctttttcaagccggtgcatagctctcaacattggtgttgccagcgccaagaataatagatagaaaataatggcccctaaaatggcgttagtaataccgttattaagatacatcatgtcttccaaatgaactaatggccaaaatactgggaacgccgtaattccaagcgcacctcctaagataatgaacacaattcctaatattctttttttagtaaatcgtttttgttgcatcgttcaacctcctctcgctccaacttatgcctagttgaatactttctttaaagtttctgcaatcgtggtcacaccaatcacttgaatatccgtcggtgcgtcccacccttgtaagttattctttggtacataaatacgtttaaagcctaatttagcagcttcactgacgcgttgttcaatccggttgacccggcgaatttcaccagtcagaccgatttcaccgacgaaacaatcagttggtggaatttctttatcccgatagcttgatgcaatcgaaacagccatcgccaaatcaatcgcaggttcatctaatttaacaccgccagttgcttttaaatacgcatcttggttcgataacatgagactagcacgcttttcaagcaccgccataatcaaggagactcgattatgatctaaccctgaagacgtgcgctttgcattcccgaatagtgttggggtaattagggtctgtaactcaaccaagatgggtcgcgtgccttccatcgaaacaaccacggctgaacctgtcgcccctgccaaacgttcttctaggaaaatctcggatgggttcgcgacttcttttaagccggcttcacgcatttcgaaaatcccaatctcattggttgaaccaaaccggttcttaaccgagcgaagaatgcggtaagtatgatgcgtatccccttcaaagtacaacacagtatctaccatgtgctccaaaatcttaggaccggcaatagcgccctctttagtgacatgcccaaccacaaaaatcgtaatctggttcgtcttcgcaatgcgcatcaattcagcggtgacttgacgcacttgtgaaacactaccgactgcggaagtcacttctggttcgctcatcgtttgaattgaatcaatcaccacaaagtcgggtttcattgtttcaatctgatgccgaatattgcccatatccgtttcaggatataagtaaagttgatcgccattcacatcaagccggttagcccgcatcttaatctgggatgcactttcttcaccagaaacataaagaatcttaccaaccttttcaagttgtccggaaacttgtaggagtagcgttgatttcccaatcccaggatccccaccaattagaatcaatgagcccggtaccactccaccgccaagcacgcggttgagttcgtttaattcagttttaatacgcggttccttttgaatattaacggtgctgatttgttctggttcagttgcccgccctgaaatcgtaaaacttgatttcgcgctagctgcaggttgttcacgttcttcgaccatttggttccaagcgccacaattcgggcaccgacctaagaatctcggggaactatagccacaattttggcaaacaaactgagtcttaattttagccacaaagattctccttcattatcgagattagttttattttaacataagtttgtgaattttcggcgacctagcgattaccgtttagcgaccagatgagccaaacccacccgttcgtttggtggttaccgtcgcttcatcatctgcgactaaatatggcatgaagatgccttgtccaattcgttcaccttttttcaagataacatcccgcggactgaagttaaccatttggataaaaatttcaccttcgttggcatcattgccgtagtaatccgcatcgataatgccgacgccgttgggtaaaattaacccttttttgagtgggttgcttgaacgattggcgatcattaaatattcgtcgtcttgcatgtaagccttaatcccggtcggtactagaaagggtttcaatgtttttgatgcacgttcaaaatcgtcatccactaacggtttgccatttcgaatcattcggaacaaacgcacaaagttgtaatgccagattgatggcaacacgaagtcctccgcacaagcaaagtcgtagcccgccgaatgcgctgttgaacgcaccggtaaactcaatcccgcctcttggtatttggtcacaatttcaaagccgcgttttttcattcctaaaactcctaatattatcgcccatttgggttctttttgtaccactgtatcataccatgaaaccgcggaggctgtgaataatgcctaagactgatttaattaaaaatttaacaaaaagcgcccaattaaagcgtttttttcgtataatagatttattaatacaaaaggggtgtcttgatggataagaatgcaatgaaaaagatggcagctgaacgctcagtggattttgtcgaagataacatgattttaggactcggaacaggttcaacagtagtttacatggtggaagcccttgcaaaacgggtacaagcagaacacctcaacttaacatgtgtctgcacctcaattcgtactgaagaacaagccaaatcacttgggattccggtcaaagcactcaaccatgtcgaccacattgatttaaccatcgatggtgccgatgaagtcgatgccaacttccaagggattaaaggcggcggtgctgcgcacttattcgaaaaattagtcgcaactacttcaacccgcaacatttggattgtcgatcaagaaaaagtggtcgatacaatcggtcgcttcccactaccagttgaagtgattccatttggcagccaacaagtgttcaacaaaatggctaaagaaggcttaaatccagaattccggatgactgcagacggccaacacgtcttaactgattctaaaaactacgtcatcgatttacacctcaaccaagtccaacatccccacctactggcatcatggctcagtgaacaagtcggcgttgttgaacatggcctattcctagacatcgtcgaccaagtcgtagttggcgcacctgatggcgtgaagattttaacagcaaaataaagcgtgcgtttaaagcagatttgacactgtgcactagcacagtgttttaaatgaccgacaaaatcggtcgtttgcaatacgtagctaagcgcaagcgtcagctttaaaaagcacgtttccaaacgaaccctcagcggttcgtttttttgtgtcccgtgctctcatataaatcgttttctttcacatttatcaatcaccattcttttagctttatccccgttattcggtttacatctcccatctaatcaactagaattaaactaattcaaaaattaaggagtgattagatgacccaagaaattacacataataatttaatcaagatgcggaccgctttagctggcgtgccacaagcaacgacgctcaaaaatgctgtgatgacgaatggcattaacgccgttagtcaacgccccgatgctgccgtcacccttgatccaacctactcaatcgacctccccactggtgatgtcagctttcaaaaaaagagtgggcggtgctggttatttgccactctaaatacattacgccacgatttcgaacagaaatatcacgttaagaatttcgaactctcccaaaattatctatctttctgggatcgcatcgaaaaggcgaacctcttttatgaaaagattttagcaactgccgacaagccgattacggatcgcgaagtcgccttcaccctcgctggtcccgattttgacggtggccaatgggacaacgcagtggcactgattcaaaaatacggtgctgtgcccaagtcggtcatgcccgaaacttataacagtgacttaaccactgaattcaacagcactcttaatttgaaactgcgcaaagatgcgattcaattacggcaacttgttgctgacaacgctagcgaaacaaccatcagtgaaacgcggactggtttcttaagtgaaatctatcggctatgtgtttacgcattcggcgaaccagtcgaaacgtttgacttcacctatcgcgatgacgaccaaaattaccatgaagaccgcggtttaaccccgcaaagtttctatcaaaaatatctcaatcgcaactttgacgactacatcaccgttgtcagcagcccccaaacaagtaaacaatacaaccaactctacagtttagaatcgcaaaacacggtagtcgaaggtcacccaatgcgcctcttaaacttaccccctgaacgtttaaaagcactggctatccaatccttacaaaacggtgaaacaatttggtttggcaatgacgtgctcgcggatatggaccgacaaaaaggctggcttgatcgcaacctttacgactattctggactctttggtttcgatttgacgatgccaaaagaccaacgacttgactaccgacaaggcgttgtttcccacgcgatgaccctcaccggtgtcgacctcgtaaacgaccaaccaacgaaatggaaagtcgaaaacacatggagtgccaaagtcggtacaaaaggttacttcagtatgagcgacgcttggtttgacgactacgtttacgaggtaattgtcaaaaaagcgtaccttacaaaagaagaacaagccgcactcacaaaaaccccaattaagctagacccatgggacgcactgcaatagagtgcgtagtaagccgagtttatcctgaggattaacacagaacggcgaaggattgcgccagcaatcgtttgacgttcagggttaaccggaaggatatggcttacggagcacgtttcaaatcagagtgcgccatcaacgggttacttctgagcacttacagcacttgacgaattggcaatgcagtcgccgatttggcaagtgaggtaaggcggaagaagttgttgatgaaagcacgtttcaaaaaaataatgccattcaaaccgggtaatttaatttaacccaccaaattttagaggaggttttccacatggttcaacccattacagcaaaagatattcaacaattcaaagccgatttcaaggcaacaccacaatccaacacaattaaaaatgccattatgaacaacggctttttagccacgagtgctaataccgattcaaaagccaaaatggcccccgttttttcaatcgacttagataccggtgccgtttccaatcaaaagcaatctggtcgttgctggatgttcgccgcgttaaatacaatgcgccacagcctccaagaccaattcaaaattaaggatttcgaattgtcccaaaactacaccaacttctgggacaaattcgaaaaatcaaactacttctacgaaaacgtcttgaagactgccagccaaccaattggcgaccgcaaagtcgacttcttaatgacaacgccccaacaagatggcggccaatgggacatgctctgcgcactcatcgaaaaatacgggattgtacctaagtcagtcatgcccgaaacatataatagtgaaaaatcaagcgaactcaacggcgttttgaaccttaaactccgtaaagatgccgttacattacgccaattagtagctgacggtgttagcgaagccgacatccaagctaaaaaagacgcgatgttaaccgaagtttaccggatgctcgtttatgcattgggcgaaccacccgttgaattcgactttgaataccgcgatgatgatcacaactatcacatcgaaaaaggcctcacaccgcaaacgttctatcaaaaatacgttggctgggacctcgaaaattacgtttcattgattaactcaccaactgccgacaaaccatacaaccacttatacagcgttgaaatgttgggcaatgtggtcggtggccgtgaagtgcggcatttaaacctcgacatcgacactttcaaacaactcgcgattaaacaactacaagcaggtgaatccgtttggttcggtagcgatgtaggccaatcatctgatcgcaaactcggcatcatggacactgaaatttatcaaaaagatgccatgctcggcatggatctttcaatttctaaaggcgaacgccttgattacggtgaaagtctcatgacccatgcgatggtcatcaccggtgtcgacctcgtcgatggtcaaccaaccaaatggaaggttgaaaactcatggggtgacaaagttgggacgaaaggttacttcgtcatgagtgatagttggtttgacgaatttgtttatcaaatcgtgatcaacaaacgcttcttaacggatgaaatgaaacgcattgaaacagaagaatacgatcacccaaccgttctcgcaccatgggatccaatgggcgcattagcaagtcgctaaacagtaaaaggggctgagacaaaagtaaattttgtctcagccccttttttgatattagaactttaatcgtctaaacgtgttcttataagtcatccccttccggctaatcctcagggtatcccgacttatggcacacgcttttttatattccagtaccgactgcgagcaagctatcataataaatctgcatcatcatttgccagtcactgaattgaagccattcatcccctttatgggcaatccctttttgacctggaaatgatgggccaaacgcgatgatgttcggtaacgcgcgcgcataagtcacgcccgttgttgtgaccggtgtgccatccaaaccagtatctgccgcataaatcgcagagggttgttgaataaatggcaatgttggatcagtaacttgcgatggataacgccgtttaaccgtcaacgtcatccccggcaacatggcagctttaatcccagttaacaactgatcttccgtcactgggattgggtaacgacatgtcagatgcatacttaactgttgggcttcaatcgataccccataaaaagcaagttgcaatgctcctgatgcttcatcttgataattaatccccaagttttccccagttgactgcgtcccgattttagcggctacccattgataaaattgacccgtttgaccagtgagttgacttgcatcggcaactaacttcggtaacacattatccgccatttcgggggcattgctaggtgcccttttgccgtgataagttttaaccgtgccatcggccaaaatcagctgtgcatgatctggcagataacttttagcgaaccgtccttcaaccgccgtaatttgttgctcagagccgtccgtaatcggtaacgctaactggacatctaacaagccccgttcgccgtagacggctggaaatttacaatctggtgtgaatccggcatatggtgcggaatgttccgccaaataaattggcatatcctgactcccagattcctcatcagtgccaaaaataattcggacgcgttgtttaaatgttatcttttgcgtcttaatcagatacagggcaaataatgtcgataaaagtggtcccttattatccaaaacaccacgcccatacagcatattatctacctgagtcagttcaaatggtggataatgccaatcatcttcaacatccacgacatctaaatgaccaagaatcccaaaataagttggcgcttgcgtttcgtctggtccatattctgcccagccaacacaattgccgacttgccccgtcctaaagcccattcgatcagcaatcgccaacactgtttccaatgcgcgtttcggaccaattccaaacggcgcttcaaacgtttgcgctccacacactcggcacgcgtaacacttcccgcaagtccgctaagaactcatcagcatgtgcttcaaataatgccttaaaatctgctctaatcggtttcacaagaatggcttctttctattaaatttcgtcaaaattaatatcaacatcgtctaagccagccgcttcggcttcttccgccaaatactgccgatcaatcatcatgataaatggatagtaaattaaaattccaagcactaattcaaataattggaggactgaccctgtccaactcccagttgaaagccacccagaaataatcggtggtgttgtccatggcaacataacgccatttgtatacggtacccatccgagttggaatacaatccctgaaatcaacgtatttaagaccggtacgataatgaatggaattgcaataattgggtttaaaacgactggcaaaccgaagataatcggttcgttaatctcgaaaataccggggacaattgccaacttacccaattctttgacgcgttttgacttgcagacggttaacatgacgattaagagtgacagggtactcccaccgccaccgtatgtggtgaagatgtcaataaattgttgagtgaaaatatgtggtaactgcgtatgattctggaatgctgttaagttatcttgcgtcagaacgaagaaaattggtgaccacacactgttggtgatagttggaccattaatcccaaaacaccagagcaacattgcgatgaagttataaagcaatacagatggcaatgagttgctggcaccttttaacggttgttgcagtaacgtgtagatgaaattgtaggccgtttcgaaactcgaaaggctaaaaccaattcgaattaagaagaaaactaataccactaagccagccggtagtaaggcatcgaatgattcactaactgcaggtggcacaccatctggcatcttaattcgccagttgcgtttaatcgcaaaacggtaaatttcaacactgactaatgcgataaaaatccctaggaaaatcccgttaggtcccaaatacattgtttgaatggcaccgattgattttttaccaacggtgacaacagtcggtgtcaaaattaagaatgaaataatagcaattgcactggtatgaatcgcttgtaaccctcggtttttaccataggcataggatatcccaaaacaagcaagcaaccctgtaaaactaaacactaaattagaaacagcactaaaccattctgtccagtgcggccctaaaatcccactccaaaattcagtccaaccaggaattggaaaattcccaatcagtaagaaaatcgatgtcacgataatcaatggcgtaatgattaagaaaccatctcgcaatgatcggagtacaacattattccccagtttaatcgcaaccggcatcaaaatctgttcgagtttcttttgcatcggttttgcctccttttaataacaatattggttaataaaatcagtaaaatcagcgcctttaaccttcattttgcataactgcaatgcgtggtcgattgaatccgaaagaccagtaccacccttttttggcatcttcacaatcgttatttgatcttgatactgttgaattaaatcggcattcttttcgatcgcggtcagcccaacaaccggaattgttgtttctttttgaatagtggctgctaattcacacgccatcgtcgaaaagtcccgataatcataggtcggtcccgcaatcacaacgtctgcacccattttctcactcatcttcgcaactttccgattcacttcggctttgttcgcctgataataatcagttccgcaataaaaggtcccgataatttcagagtccattttttttaatgccttatcgagcgtatccgcagcacccatcgctaatttttttccacctaaaggggtatcccctttttccttaccacctaatccagcttggatttgatccaacaagacaattactttcatttaaaaccctccttttaatgttcacgttgcaagatgttatggaacgtgtatttatcagcacgataatgcgagttatcataaagaattggataaccgtccattgaatacgcaaccgtgtgggctagaaaagcgggttgccctggagaggtctcaagtaagtcacttaagccttttttccaatacgactgcttcgagttcttgattggcatacccgattgggattgtttgctcaatcaagcggtagagtgacccttgtgcctcatgggccgttaattctggtagaattttttgtttcagatagatttgttcgtgggtcatcgcttcaccgtctgccattcgcaagcgttcaatctgccaaactggctcctgtggtgctaaatctaacttggaggccacatagtcgggataaacgattgtccggcgtaaatctaacacccgcgtgctgacatccaattgaaactgtttggctgcttcggtaaaaccaactaaaccagatgaaccactcgaaattttactttgtgttgcaagtacataggtgccacgatttcgatcgcgtaccacgacatgttgtttaaccaatagatcgattgctttgcgaattgttagccgcgtcgttgaaaattgattggctaaatccgtttccgatggcaatttctgatggatcccatagacccctttttgaatgtcatctcgtaaggcttctgcaatttcaacgtatagatacttaaccattccaaccacttcctctattcaactggtgctttaatccgtttcgcgtaggcttcaagccattctgctgaaatgggttcgatcaccgtcgtttgacttggccctggattagccataaaaatttgtggtgccgcatcttgattgccagctgcaaacgtaaactcaacgttcgtcgccacgccccattcaccttgattatttaaggcaaccaacgaaaactcgccagctttgccgtagcgtttttttaatttctcaacaaacggatagactgcttgatcacacgctgcttgtggtgataaaccggtccccatcaggcgcacaatctcatatgaaagacagcccttcattaaatcttcgcctaacccagtagcggttgcgccaccgatttcgctatccacgtaaaagccactgccagataatgcagaatcaccagtccgccctggttttttcataaataatccagaagttgacgtccccgctgccataccggcagcttgatccaaactaaccatgccaactgtatcgtgaccatcatatgggctaagatttttttcgttaatttctttaattcgttgcatccagattttgtgtgcgcgttcggtcaacatattacggctttcaaaaccgttaaacatcgcatattgtgacgctcccgcaccaaccaagaaactattaaaatgatcgtcacttaattgacgcgcaactgagattgggttcttcacatcactaattcctgcaacagcaccaattgcaaaagtgttgccatccatgaatgccgcatccatctccactaagccttgcgcatttggcaaaccaccgtaactgaccgatttaaagaaggggtaatcttccacttttttgatagcggtttcaattgcatccgtactttgcccaccattttttaaatcagccatcgctttttgaatcccttcaaaggccattcgccaagtcccaatcattgcatatgtcataactctcatctccacatgtaagcgttttaataatcacggtataatcaaaattgtatatacaatcaatactttttttgaaataaaaaagccaccgcagtgacttttcatttaaagatagaggccaatcaacattcccactagccaaaaaccgttaaagacaattagattctgaaccgctgtaccaaatacaacgcgtttttcctgactcttctgtaatgcaaacccattacgtaacaaagttgggccactcgcaaaagctagcgctgctggccatggatataatttcaggccaatcccaacaataatcaccacgtaacaactatacgcactaagttgataaagttgaatgccgcgcttttgaccaatgtaactgattaatgtgtgccgcccattctctaaatcgactgtgtaatcacaaatattgttcattaacatcaaattagcaatcaggaagacagttggtaaactcgccacaaacaccaaaatcacattcagccaattcagttggaataacattaacggcccatcaaagcgcaaatcgaccaactgatccgccggaacgttgacatacaccgtcaaaaagaaattaccgaaccctaataccagactcgataacaactcacccagtggtaatcgtgaaattgggaatgggccgtaagtatataaaatcccgattaagatgaacagaacactgatggctaacacaattaaatttgtgcgccagaccagaatcagccccagaacggttgccgtacttataaagccgatcaaccagcgtaaagcaaccttaggggcaatatcttgtcgtcctaatgcactggttgattgctggagcgtttcatttttagcgaggtgaaagtcgttgtaattattccatcccgttgtgaagacatcaattaacaccaatgcacagaagtacaacacggtattgatcggatcaatttggtggaaataatacaacgtaaaaaagaacccagccataaagggaatcacgctaccaactttagtgcgtaattcgataaaatctaaaaacgccttaacagacatctattccgcctccgataacattcaatagtcctattctaacagagaatgtctaacaaataaaaaaagagtcggttggaacaaaagtaacttttgccctaaccgactctttcaacagccgaaatttgatcatctaaccatgttctatctgaacagatcgcatacgctgtttgattctattttgttttcaaatcttcaatcgaattaatattcgtcatatacttcggtacagctaaaccgaccttagcaccctctaagttcggacctaagtcttcaaactgacctttgtaatccttgtagtataaaccagaggtcttcggtaaccatgcggaaacttgtgcatcggctgctttagttgcgactgacgcccacatcggttgaatttccatagcttgaatcgttggttgataaccttgttgacgtaaaacttcagccaccacgttagttgacgcgatttctgaatcccaagccacataggttaacttaattttcgtgccatgaacctttttaacacccttagtccactcagcaactttttctggattgtcttgaatccaatcgcgcgccgccttttcaggttcaacaccgtcattgactttaagcattacggtcgacatttcctttggcgtccaatggaatcgatttaagatggtatatgcttctggcatatccttctttagccccttacgaacaaccgtattaatgtgttcagcttgaccaaaaacatttttggggtcttttaaaaacttgattggatatttagtaaacatccaatgtggttgccaaccagtaatgacgattgggcgtttatccgcaatcgctttgtctaacgtactggtcattgccgcagttgagctggtttgcaactgccagttctgatcattcaaatgatacttgttaattgcagtttgtgtggatgccataatcccagcacccgcgtcaattccggtaatcgtgtaattaatttgaccgcctaatttctcatcggtagcgtacggcttagtttgcgaactgcaggccgttagaagtgtgacgagccccactaaggtgaaaaaagctattaatttattcttcttaatcactgaatccctccttaatgtttacgttgccggttcaaagcttgggttaaacgatcaataataatcgctaagattacgattgccaagccggctgcaaaaccgcccccagcatcgttccggccaacagcaaagtaaactcgtgttcctaagcccattgctccaatcattgacgcaatcacgaccattgataaggccaacatcatactttggttaaccccagccattaaggtcgatttcgccaatggtaattgaaccttaattaacttttgccattcagttgagccatatgaatcagaggcttcgatcaattcggttggcacttggcgaatcccaaggtttgtcatacgaaccgttggtggcatggcaaaaatcactgatgcgaaaacgcccgggaccatcccgataccaaagaaggcaacggctggaattaagtaaacaaatgccggcattgtctgcatgaaatctaagatgggtttaaatattgcctgggcaatatcgcttttggccatccaaattccaagtggcaccccaattacgagggaaatcagactcgaggttaacactaacgttaacgtttgcgtcatatcccgccagaaatcaaggttccaaatcaagagtaggccgaggacttcaaagataattaaaccccattttttggtgtcgcgattcgctaaataagtgacgccagcgataatcacgatgaataaccagatggggattaaatcaaacacccattggaaagcgttgataattccgccaataaaattcgttaaaccattaaaaaagccagtaaattgtgtcagccaatcgacaaagtgatccatccaattggcaattggtaatttagcaatcgtcattaaattaagcaaaatggttcacctcgtttcctgcaagtgcccctaagacggccccgcgaataataatcccacgtaattgttgcttatcatttaagacagcaaacggaatgcccgtttgcgaaatatcatctaagatatcagcaattggtgtctcttcatcggttgttggaacttcagtattcacgattgattgcaaatcacgactttctttgcggactaactcaagtacatcacgcgcatcaataatcccaactaactcacgtttactgttgacaacgtaagcattagaaacttcattttcacgcattcgttttaaggccaaacgagggccatctttttcaatattaacagtcgttgggcgaatcataacgttgccggccgtgtaaactttactacgatcaacgttttcgatgaatttctctacatactcgtcagcaggccgtgtcaagatatcttccggtgtcccggtttgaacgatttccccatccttcatgatcatgatgtggtcgccgattttgagcgcttcatttaaatcatgactaataaagataattgttttgtgcatcgtttcttgcaagtcgagtagttggtcttgcatgtcagaacgattcaatggatcaagcgcagaaaaagcttcgtccattaataaaatctcagcatcattcgctaatgcacgcgctaaaccaacccgttgttgcatcccaccagataattgtgtcggatactgatcgccataaccatttaaaccaactaaatcgagtgcttcattcgctttttgttcccgtgtcgccttatcaatgccttgaatttcaagcccataggctgtattttcaagaatcgttcgatttggaaagagcccaaaattttggaataccatgctcatctttttacgccggacttcacgtaatgccttcttatcaatctgcattaaatcctcgccatcgattaatacactaccttcagtaggctcaatcaaccggttgatcatccgaaccaatgttgatttaccactcccagatagtcccataatgacaaaaatctcgccagattctacttcgaagttagcccggtcgacaccgattgtcgcacctgtttcctttagaatcgctgcttttgattttccttgtttcagtaattctttggcacgcggcacgcgcttaccaaatatttttgttagatttttgacttgtaatttgacagtcatagaatccccctttgatttcattttctgaaaactatatctaaaaagtatacaggtttattgtgaaagttgcacaccgtccacttttattctcattttattctaatgtgatagttaggtagccaactttctttaaaaattaaaaaatcgctagatggggctttatgttagtctttaaaaatcagattagttctaaaacggaaccaatctgaaaatgcaactattttcctttgtacattaaaattaaatgagaattaatcccttttaaaattcacaagcccttaattaggccatcaaaaaaagcgttgaccaaatcggtcaacgcttttaaaaaatttagccatgtactgcttttcgttgatagcgatgatacaaagcaagggccataatcgtaaagacaatcggaccaatgaccatccagaaggcatctaaatattgaccttctaacatcggttgaataatcgtaaaggcaattccgaagacaaggactaagtcgaccacaatcgtcaccgccttaacagcaactggtgatttaaagaattcgtaaggccgttccaaatctttgcgtgccttgaaatatggaaaggcagtcactaaaaagaggtatggcaacgatgttgaaacgttagacatcaaagtcaagacattatagaagtcaccggcagctttaccaccaaatgaaataaccgcgattaaaatgcagactaataatgcttgcgcccacattgctttttcaggcatgccatgcttgttaacttctgcaaagccgttcggccagagtgctttaggtgtcccgagtacaaatgactttaatggtgaataaatcaagacggcaaatgcgcctaagtaactgataaacatgattaaaccggtaatccgagcaaaggttgttccaatcgtcatcgcaacgggtgtcgtcatcccaaaggcatggccgaattgataacccaagttttgcataagaacataagtaatattgcccatgttagctctattcccgctcaagacttgttgccagttcgttgagatgccccacataaagattgcaaccgcgtagattaatgtaatgaagactgtcgcaatcattaaccctttagggaaagtcttttcaggctgatccatactatcggtaacaccgcccatggcttccatccccgcgtaagcaaagattgagaagacaacaaatgataacatcccaattggtgtttgatagctactcatcggactcttaacaaaggtcgtcgtcccatgaatcggttctgccaaatgaaaacccgttttaaaccaaatcgccacactaatcactaagaatgcggcgaataaaaaggcaacggccatcccactgaatgacgcaaacttttgaatcttatcaatcccacgacttgataggaaagttaataataaaatccaaagaattcctaagacaccgaccacttgagtgccattcatccctaataaatgccaggttgctgtttgatctgaaccttggaggaacgttgaaaacggcacccacactttagcagctgttgacaccatccagacaatccatgacgctaaccagatgaacgtcccgatgaaagccgcctttttaccaatggatgcttctaaccaagaatagatgcccccgcgtgattctttcaaagaagaaccaaattcagcaaacattaatgaagttggtaagaaaaagaaaattgccgctaagatataccaaataatgctggcatagcccattaagtagaaagcaattgtggtattcgcaaagccgaagattgacccaaaaatcatcaatacgagaccttgaacgttaattttttttgatttcgccatttcaataagtcctttataattgtattaagtagaataaatatacaattcaaagggcataatgtcaattatatttgaataaatcaaccgtttccagcctttttattcatgtattcataattatatacaatttacgccacaaaaaaagacgttcacttttagcgaacgtcgattgccttatttaatgttggcaaccttagcgactttgccactattgacactcgcgctaatttccccttcttgaccgttattgataacaaattgatcggttgcttgacaccgtgggcaagttgtttcaatttgaaacttggtagagccatctgaattatcttctagtgctgtcttcgtcgtgatttccatcgctggatgttggcacttatagcattgaaagacaataaaacgccgttctacaaattcatctgctaaactcatgtgattcatcctttcaactagcttatttaagttcattctagcagtctgctattttttagggtacctttttgctcacgtgtcgttttctgaaagcatcccttagaaatgaatcaaaaggcgaacaattttaaagtttaaaagcattatggtatgtgatatacttacaacacaccatctagaaggagaggtttaaaagtttgctaatcacactaaaagcaagttatttttctgcaaattcaccaaattctagttcatttcacgaagattcactgatagaaatcagtgataatggtcaaatcacaaacattattcatcaaacggcgtcagaatactctgagcgattatcagctgcacgccaacatgaccacttaatcacactcgctcccggacacttcttgttaccaggctttatcgatctacacaatcatgcgccacaatggccacaagctggaattgcccttgatcgccctttagctgattggctcaatcattatacctttcctcttgaagcgcgctacgccgatttagatttcgccacacctgtgtatcaagacttagtgaccgaaatgctcgctaacggcacaacaaccgccctatatttcggaacaattcacaattctgcgaatctacgactcgcagaaatttgttcccaagcagggcaacgggctttcatcggaactgttgcgatggataatccagatcaaacaccagactattatcgtgatgcttctcctgaagaagccattaataaaacacaaacttttgttcaagcaattcaagatacctatcgtaatgggttcattcaacccgtcattaccccccgcttcatccctagttgcacaactgaaacacttcagcaactcggtcaacttgcacagtcccaacacatcaccgttcagacacactgcagcgaaagcgactgggaacacgattatgtacgcgaacgttacggccatacagactctgagatgttgcaatcattcggattattgaatcaacattcggtattagcacatgcaacacaactgacaactactgaccaaagtatcattaaaaccgaacaagcagcgattgcgcactgccctatctcaaatgcctattttggtaacgggattctccccgcacacgagttacttaatcaaggcattaaaattgggcttggcagtgatatcgccggtggttatacccctagcttatatgccaatttgcaacaagccgtaacggcctcccaaattcgacaagacggggttgacgccaccattgcggctgaccaacgcggtgttgcgaacagtcggatcagtgctaaacaagctttttatatggcaaccgtcggtggtgcaactagtcttggcattcaagctggtgccattgaatcgggattgcttgctgatttccaaatcgttcaagcgccaccacgctttgcaagtcttacaccagatgaacaactcgaacaacttttattccgccacaccaaacaccaaattaaggccgtctacgttcaaggtaaactggtccacgaaaaggagcacaactggtatgaatgaacaatctcaaaaattaatggtcggtcctgacgagccgatttcgaatcaagaagctggcttcttaggactacaacacgttttagcaatggatgtctacgttccccccgttatcattgccggtttattggcgatgggtcttgatgcaaaagccggcttaattcaagcgacattccttgctgccgggattggtacgattcttcaaaccaaattttttatgaaaatgcctgtttcccaaggcccttcatttgttccaattggggcaatcgccgggatttactttgctagtggtgctaaagacggcgggatggcaacggtgattggcgcttcaattgtcggttcaattctgttaattcttctcggcgtcaccggcctcttccaaaaaattattaacagcttagtcccccaagtcgtcggtggcacaatcatcaccatcgttggtctttcactgatgccatctgctttaggtgataacattttcaaagcacagggcaatatcaatgagaacttactcctggctgttgtgaccgtcgccattctaattctttgtgtttcgctaggtatctacttccctaaattacaaaaactcttcaaagttagttccatcatcatcgccttattaggcggaactgttttagcaaccatgcttggtaaatttgactggcaaagtgtgaacgaagcgagttggtttagcttgccaagtttcaccgcattccactatggtatgcacttttcgatgacagcaatcatgaccttcgtcattatctacgccgttttaatgaccgaaacgaccgggacttggtttgcaatgagtgccgttacggattcgcccatcaggaagaaacaatggaatcacgggattatcggtgaaggaattagctgtttaatcgctgcactcttaggcggctcaccagttacagggtatgcaactaacgccggcattatttcaatcaccggtgttgctagtaaaaaagtattcgtttctgccgggatttggtttatcatcttcggcttctttaataaattagcggccttcttatcagcgattccagccccagttattggtgggattttcgccatcatttgttcaactatcatgctcaacgggttaaatgttattcgcacactacacacccaagaacgtgatatgtacatcatcggaattccaatcattctatgtatcgccatcatcatcatgccacaatcattggtgaaagcaacgcctcaaatgatccaatacttacttgaatcaccaatttcgatttgtgcgcttgccgcaattattctcaacttaatcttaccaagagacagacaaattgcgtttaattagactgaaataaaaagaagccccctgataaaaaagtttatcagggggcttcttttttcgtaaatgtatttcccgattgagacagcacactttttttaaacgtgctccagcaggcatattcctgtgcttaaccaaacttgtcgcatcggcgattgcagacaaatccagttaatactcgaaatataaacgcctgcttgcgcactcttttagacactgaccattcgaatcgtcatgatgttcttattcatcgagatatcttccacaatttctgcatattgcatttcccggggaatttcgatgcgatagacgttagtgtaaatcgtatcacgttcgttttgcgttactgagaagttcacatcgcgaatttgaatctgatgttgttcaaaatagctctgaataaactccttggtttccaatttatgcttatacttaatttcgatttttttcaacgtattgatgtgaataatctttttcaagaagacaatcacgaaaatgacaaagaccgcactgatcaccgcaatttgatagtagcccatcccaattgcaagtcctaatcccgcagtagcccaaagtgaggccgccgtcgtcaatccttgaatcttgtggcgggtgacaataatcgttccagctcctaaaaaaccaatcccactgacaacttgtgcaatcagccgcgcttgatcagaacgaatagtggtactaatcgcactatgcgctaatgcaaattgaacgttttgcgctgcgatttcctgctgaatcatcgcaatcacacacgcaccaatgcagaccagaatgtgtgtccgcattccggctgggcggttcttatattcccgatcagatccgataatcccagcaattaaggttgccagtagcagtcgaataatgatatgcacactcgttacttcaaacaataaaatccctcccaaataataccttatctctagtctagcataccgaacaaaaaaagcgctcgtcaatccatatcaatttacggattaacgagcacctattcattagccaactaggccgattgtttgtagaatcaaatagatatttaaaagcgtcaacacaattgtgacaaaccatgccgtatatttcacccaagggcggttaacgaatgggcccatgattttttcatcgctcgtgaacattgtcaatggaatcatcgagactggcaatgcaacactcaagaagacttgtgagtaaatcaagaggttttcaacttgtgcttcgttcccatggtagtaaaccgtgaaaataataacaggtaagattgataacccacgggtaatcacccgtcgtgcccacaatggaatcttcatgcgaacgaaaccttccatgacgatttgtcctgaaagtgtccctgtgatggttgaattttgaccagaagctaataaagcaacggcaaagagtaaactcaacattgggctagcaatgctcccaacaatttctttgttttgtaaagcattgaataagtcaacgaatcgtcctaaatcactgttagttccaaagaacattgctgcccctaaaactaagagtaaacagttaacgataaatgcgactgataattgaatgtttgaatcaatgactgtaaacttgattgctttcttcttttcggcgtaatcgtcacggtcatattgacgtgcttgtgcgattgacgaatgcaagtagagattatgcggcataacagttgccccgacaatccctaatgccaagaatagcatcttctggttggtaacaatccgtgtacttggtacaaatccgcgcattacgtcgcccatatttggttgcgctagaatcacttcgtataagaaaacgaataaaataacggccaccaaggttgcgacaatcgcttcgatcttccggaaaccaagtttcattaatagtaataatagcaagacgtcaaatgcggtaattaagacaccccagagcaatgggatgttgaaaatcagttctaacgcaattgcggaaccaataatttcggcgatgtcggtcgccataattgctaattcggtgacaatccagaggaaaatccccatctttttaccggttttggcccgcgtcatctgcgctaaatccattccggtcacaattcctaaacgcgctgccattgcttgtaataacatcgcaattaagtttgatactaggatcacactgatcaaggtgtatgcgtattgcgcaccaccggcgattgacgtgatccagttccctggatccatataaccaacggccactaacgcaccaggtcccataaaggccatcaacgtccgccaaaaaccagcgttcttgggaatcgcaaccgtgttattaatttcttcaagactcgtgccatcagcatagtgtatgaatttctcatgcttttgttgattaagttcacccttttgtgaatcttctcgctgcttcttatccatataagtacctctttctcttcgattgagtcgttcaactattaggattcaatgactttgattttaggatgacctaactctgatcgtctccagtgttcaaattaatccttacccattctatcatatctctttgatgttgtccctgaacaagattaaaaaaaagctgtttctcagcgtttttttaagtaaccgattacaaataattgcccaccttaagtgctattaaaaatgacgttgactgtctttaacagccaacgtcatttaacttttatttagacgactaaacttaatagtaaaacgccaattaacccaacaatcgaaatcaatgtttccaaaactgtccaagttgcaagggtttctttgacacttaaatcaaagtattccttgaacatccagaacccggcatcattcacgtgagaaaccgctaaactgccggccccaattgaaaggaccatcagtgcagggttcacaccggctgattgcattagtggtaagaccaagcctgccgccgtcaatgacgcaacagttgctgaacccaatgccacccgtaagacaactgcgattaaccaacctaataatagtggtgataaattggcatttacgaataatttagtgacactatcgccaaccccaccgtcgatgaggatttgtttaaacgcaccacccccaccaatgactaggagtaacatcgcgattgatttaacggcttcttcaatcgtcttcataatcgctagggttttaatccgacgcgcccaacccatcgtatacgtcgcaaccatcaatgaaatggtcattgcaatggctggtgtcccgataaaatcgacgattgaatccagcatcgttggatttttaggtaatttcccgccgttaaaggccatttgataaatcgtggtgacagccatcaaaatgactgggaataatgaggttatgacactaattccaaaccccggtatttcgtctaatttaaaggttttctgaggcccaagtgccgtcagattaccttggcgcgcgaacgcatctggtactaagcgttttgcaatcttagtgaataatggaccggcaataatcactgaagggatcgcaattaagaccccatataacaatacgtgaccagcatttgcccctaaagctgaggtaattgctgttggtgctggatggggtggcaagaacccatgtgtgacagaaagtgctgcagccatcggaattccaaggtacaaaattgacacacttgcttcgattgcaatcgcgaaaacgattggtactaacaagaccatcccaacttcaaagaataaggcaatcccaatgatgaacgaagccaacataattgcaatttgaagtcttttttaccgaacatatcgattaaggtatgcgcgattctaaacgcgccaccagcgtcggcaactaaccgccccatcatggcaccaaagccaaagacaattgagagctcaccaagttgaccgccaatcccgttttgaacactggttgcaatgtccgttaatggcatacctaggccaaccccaacggccattgccgttataactaaagcgataaacgtattgatcttaaatcgaataataagggcgagtaataagataatgcccaataataggactactaatgccataattttccctattttcaataatgtttgcgctatcataatattgttaaaagtaactgggctttcagacccagttcacttcgttactctttaacttgcatatgtttgcgttggaagtcagcaattgcgccgtattccgtatttaattcccgtgttaatcgaatccagattggtaatagttcgcgataaacttcaaagttggcttcttctggatgatgcacattcgtcacaccaaccatttctttgacagctgatagatcatccactaagcctaaactatacatccctaagacagcagcacctaaacatgagctttcgaaactctctggaatcgtgacgtcttgttcaaagacatccgccaacatttggcgccataattctgaacgggagaagccacccgttgcctgaatactctttggtttacctgccacaccttcaatcatcagcatcaccatgtataagttataaacgatgccttcaagcgctgcacgcaccatgtgcgcccgcgtatgttgccgcgtcaaaccgaagtatgatccacgtgcatctgcatcccagattggtgcccgttcgccacccaagtaaggatggaataagagtccatctgaaccagccggaatttctgccgcaatttgtgtcaaaatatcgtatgttgaaacatgcatttgttcagccttgattttttcaggtgcaaaaagttgatcgcgcacccaacggaagacaattcccccgttattgactggtccaccgaccacccatttatccttggttaaggcgtaacagaataatttaccgtttggatcaaccactggatgatcaacaaccactcgcacggcaccgcttgtcccgatagtaacggcgactacgcctggatcaattgcatttaccccaaggtttgataaaaccccatcgctggcgccaaagataaatggtacttcagcaccaatgccggttaattcaccatagatcggatcaatccctttaacataatccgttggttcgactaattcaggtagttgttggcgtgtgacaccagccacttcaagggcttgttgatcccaatctaaattaaaaatgttgaacaagccggttgctgaagcgattgaataatccatttgatacgtatggaaaagtttttggaagacatacgttttaatatcgatgaattgactagcttggttgaacaattcaggttgcgcttctttcagccaaatcagttttgaaagtggcgccatcggatggattggtgtgccagtgtgttgataaatggcttggcccaacccattttctttcaattgttgacttgctttagcagctctattatccgcccaagtaattgcccgagttagcggttgatcatttgcatccatcagaatcaagctgtgcatcgcagccgagaaactaacgccctgtaattcgccggcttgaacgttgcccttgcgcatcacctgtcgtaatacttctgacactgcattaaaaatttcatccggatcttcttctgccatatcgggtacggtttgatataaaggataaccaatgtttgcgtaagctttaacattcccttttaaatcatataaaaccgctttcgtacttgttgttccaatatccgcaccaatcatatatttcatcataattacctcgtttatgtggtgtttactgactacttactaggataccacttatttcttatcaactgcatggccgccgaattcatttcgtaaagcagcgacaactttaccagtgaatgtatcatcttcaagtgaacgataccgcatcatcaatgataaaccaatgaccggtgttgggacttgtaatttcaaggcttcatctaatgtccattttccttcacctgatgagtgcatgataccttttaagccttctaagttagggtcttttgcaaaagcagattccgctaattccatcaaccagccgcgaatcacagaaccattactccaaaccttagcaaccgcttcgttatcatattcaaactcaccatgtgataacacatcgaatccttcagcgatagattgcatcatgccgtattcaattccattatgcaccattttgagataatgaccactaccagccttcccggtatagagatagccatctttttgagcaatatctttaaaaatcggttcaatctgtttgaagacttccgcgctgtcgccgccgatcatgaagtttccgtctgcgttagcaccgctcatcccgccagaagttccgacatcgaagaaatgaatcccttttgcggcaagcaatgcattgtgttgtttagaatcttcgaaaaatgaattaccaccgtcaatgacaatgtcaccggctgtcaatttggtacttaacgtttcgattgtggcttgtgttggcttaccagcaggtaacatgctccacacaattttaggttgtggcaattgtgccaccacatcatcaatatcctttgcaggtaatgcacctaagcgggttgcttcttgaaccgctgcttcatttaagtcaaaggcgacaacctcgtgcccattacgtcgtaagttagcgaccaagttaatccccattttgcctaaaccaatcattgctaatttcatctttgctagtccccttatccacaatttcatgtcacttttattaatgtcttcattatatgtaaattattttctttaatcaaccctttttgagaaaataattttcttagttgctttttatgctatactatcgataacaagggggcacttcaatgacacaaaacatcgattccttactccgtgcgtactacacgaatttaagtgaaaaatacaaacaaatcgcagattacatcttaaaaactgaacatttcaatcaaagtttaacgattcaagaatttgcggctgactgtggtgtttcaacggccactatttcccgtttcgccaaaatgttgaccttcgcaaacttccaggcactcaaaatggcgttacttgctaaacaagcaatcccaacagataatccactcttccatgaaattagtaataatgatgactatctgaccatggctgataaaattttcgcatccaatactaacgcgctcaaagcaactcgttcactactgactgaagcacaattacggcaagccgttgattatatcaaccaggccaagcgcttaagtttatttggcttgggcgcttctggaatcgtcgctcaagatggctaccacaaatttttacgaattgcgattccaactgtttacagccaagactaccatctacaattgatgcaggccacccaactcaccgaacaagactgtgcgctgattatttcacatagtggtcaaaataaagatgctttagaaattgcacgcatcttaaaagaacgtcacgttccactgattgtcatcaccagttttggcaattcaaccctcgctaaattgggtgatgtgacactgttgtccatttccgaagaaaccaattaccgcgccgaagcactacacgcgttaattgcacaaatcagcatcgtcgatagtctgtttatgatggtcgccgttaataatggcccacaaacagaacaaagtttcaaagccattcggactgaaattgatcggactagacaaaaataaaaaagctgaggttgaagaaatacttcaacctcagcttttttgctgttctattttgaacatctaaacgtgctttttggttgcaccaacttccgcttaataaaaaattggtagtcatcctgaattctggataactaccaatttttattaatgctcagttgctgaacgcaaccaaacgcactctattcttaaacgtacttttttaaacagcttcctgcgcttaaccaaatttgccaaatcgccgattgcatcggtaattcgtcaaatcctgttaatgctcagaagctacccgtttcaaacgtactttatttaatttctgctaatgtcttttcaaggtgggctaggacacggtctttacctaacaattcgattgaatcaggtaatgatggaccatgcatttcgcgagtcgttgcaatccgaattggcatgtacaattgacggcctttaatcttcgtatctttttggatgcctttaatgatttgcataatccgtggtgctgtgaataatgttaaatctttcaagcgttcgctgaattccttcaaaacaacggatgctgtttcgttatttaattcttcaagcgcttcggcgtctaattgttcaggttcttcaaagaagacatctgacatttcaacgatttgagctgtgtagctcatttgatcttggtataacgcaatcaaatgacgggcccattcgatcattttgctatcaggattttcagcgattttacccgctttaatcaagctttctaacgaaagatccatgattttgtttggatctgattgtttaacgtattggttattcacccattcgagtttcttttgatcgaaactagctggtgatttgctcaaacgttttggatcaaattgtttgatgaattcttggcgattgaacaattcgctttcgccaactggtgaccaacctaatagggcgataaagttaaacatcgcttctggtaagtaacccaattcgcggtattgttcgataaattgaagcactgattcatcacgtttacttaacttcttacctgtttcagtattgatgatcaatgtcatgtggccaaagactggtggttcccaaccaaaggcttcgtagacagccaattgttttggcgtgttggcgatatgatcgtccccacgcaagacatgggtgatttccatcaagtgatcatcaacgacaacggcaaagttatatgttggcatcccatcgcgtttcatgatgacaaagtcgccacctaaacgatctgattcaaagctgatttcacctttaacaatgtcatcaaacttgtaaacgtgatccttaggaagacgtaaacgaacaactggttgtaagccttttgctttagcagcttcttggctagccttaatttcatcatcactcataccttcgtattcgtagatgtaacgtggtgcttcgccagctgctttttggacttcccgttcttcagttaattcatcttctgttttgtatgattcgtaagctaatcccttagccactaactcttcaattaaaggcgtgtaaatttcgcgacgttctgattgacgataaggaccaaagtcaccaggcttatctggaccttcatcccaatccatacctagccacttcaaattatctaactgactgttttcaccgtcagcaatgtttcttttcgtgtcagtatcttcaatccgaatcacgaaagtccctttgttgtgacgtgcaaataaatagttaaataatgctgtacgagcattcccgatgtgcaaatgacctgttggacttggcgcataccgcactcggattttattttttgccataaaaaaaacgcctctttctaaaattatacttgtctactagtttaccgttattatgcctaaaaataaaggctcagagaccactaatccacaaaaaaagaatctaggacaaaagtatgtttgtcccagacccttcttctgatagtagaattctatcatttaaacgtgctttttgaaccatcttcctgcgcttaaccaaatttgccaaatcgacgattacatcgtcaattagtcaaatccagttaatgctcagaagataaccagttcaaacgcactcttccacttaaacgtgcttacactaactgcttcctgcgccttgctacatcagtcacatcaccggctttaccggcaatccgcctgattaggcaaatgcttaaaagcaaaccgttagtgacgcactctcaccgcattaacggagtggtgtccattgccattcttcaacttctggtaaatcagtaccttcattgcgaatgtattgattgtgtttagcaaccatgtcatccattgattgtgcgaattgaccagcttgatcgccaagtacgtcaactgcaacttctttagatagactgaaacgatccatttgattcaagacacgcatgtcgaatggtgttgtaatatcaccattttcacggtagccatgaacatgaaggttatggttgtgacggtcaaagaagatatcacgtactaagccttcgaaaccatggaatgcgaagaccactggtttgtcttttgtaaagtacatgtcgaattcttcatctgttaaaccacgagggtccactttaggtgaacgaagtttcaataaatcaacaacgttaatgaaacgaatcttcatgtcaggatattgtttgtgcaagattgagattgcagccaaactttcaagtgttggttctgtcccagcagctgcaatcacaacatctggttcagcatcttggtctgtacttgcccagtcaataatcttcaaaccattcttaactaagactgttgcttcgtcaattgagaaccattgttgacgtgggtgttttgaagcaaccactaaattgatcttttcttggctcttgaagacagtatccattgttgctaacaacgtgttagcatcagcaggtaaatattcacgaatgaattcaggtttcttttcagctaagtgtgttaagatacctggatcttgatgtgtgtaaccattgtgatcttgttggaaaacagttgatgtggcaatcacgttcaatgaaggatacttgttacgccatgcttgttcatcagccttacgtaaccatttgaagtgttgtgttaacattgaatccacaacgcgcaagaatgattcgtaacttgcaaagaaaccatgacgaccagttaggacataaccttctaaccaaccttcagcttgatgttctgataattgtgaatcaagaacacggccttctgttgccatgtattgatcgtttggttctttgattggttccatccattgacggtttgttgcttcaaaaatatggttcaaacggtttgacattgtttcatcagggccgaagattctgaagtttttattttgatcgttgtctttgatgatatcacgaacatattcgcctaaaacaatcatgtcttgcgcaacgactttaccgtgttctgaattatccacagcataatcacggtaatctggtaagcgtaatggtttaggatcaatcccaccattggtgattgggttagcagccatccgttgatcgcttttaggtgcaatttctgcgatttcaggttttaattgacctgcttctgtaaacaattcttctggacggtatgatttcatccaatctactaatgcatcaacatgttgcatgtcagcactgtcaattggcactggaatttggtgcgcacggaatgaattttcgattggtacgccatcccatgtcttaggaccagtccaacccttaggtgcgcggaagacgatcattggccatactggacgagatgaatcgccgttttcacgcgcattcttttgaattgcttggattttttcgatggcttcatccattgcagcagcagttgctgggtgcatcttttcagggtcgtcgccttcaacaaagattggttcccaaccattgccttcgaagtatttcgttaattcttcatcactcttgcgtgaaagaattgttgggttagaaatcttgaaaccgtttaagttcaagattggtaagacagcaccatcattcttaggattgatgaatgtgcttgataaccatgatgcagctaatgggccagtttcagcttccccatcacccacaacaacagcagcaatcacgtctgggttatctaaaatcgcaccaacaccgtgtgataatgaataaccaagttcgccaccttcatggattgaaccaggtgtttcaggagccgcatgagaagcaacgccgcctgggaatgagaattgtttgaataatttcttcatcccttcaacatcttgagaaatttctggatagatttctgaatagctaccatctaaatatgagtttgagaccatcacttgaccaccgtgacctgggccttcaacgtagaacatgtttaagttatatttattaattgcgcggtttaaatgagcatataggaagttttggcctgagattgtcccccagtgaccaattggttttgccttaacatcttttgcttccaaaggacgtttcaatagtgggttatcttttaagtataattgaccaactgagatataatttgcagcccgccaaaatgcgtcaactttagcaaggtattctttgcttgaataatctgtcattttaatagcacccctttttaattttaaaaaagttcctaatagctttactttaagttccagtcgcagcttttgcaactttgttgtttctgactactctcttatcatactaaactttttaaaaaagtcaaccatttttaatattggggcgtaccaattttttaaatctaaaaatagcggccctattcgcgaccgctaaccgtaacgaatgtattatatttcatgtattggtagtgcaggcgcatcgttgaaaattcaaacggtgtcccatcgtctaagaagaaaatcccttccatgatgccaactggttccgtcggtttcaactttaagtgcgcttgatcatcatcagttgatggttccgcgaaaattgacaggaaagcgcgtgtgacttcttgatttttctcggtttccaagtagttaaagattgaactcgacacaattttttcggtcaattcgggcattaccttaatcggaatgaagcccgtttcaatcatgaatggttcatcatcaaacaaccggagacgcttgatttcgtaaacaaaatcatctggtttcaggaacaagtctcgttgcaattccgcgctcggcttgatgacttggaaatctaataatttaatccccggtgtccgattaccggctttaaaactgtcggtaacccctaggttagagccattgtaattaaaaaacgagccaccctttaaataaagtggattaataaaggttcctgaaccccgttttttgaaaatgatcccttgattagccataatgtttaacgcacgtttgaccgagctacgactcacttgatagtgttcagtcaacgtccgttcatcgggtaatttcatgctgggaaatgattctgcgttaatcgctttttttaagtccgcgataatattctgataaactaagtcggccatgctaaactcctttataaatcattttatctcaagcttattatacatgattcctaaaagtcgtctacaaacagactcgataaatgttcaattattaatgcaggccaataaaaaaagaggtgctgagacaatgtttattgcctcagcacctcgcgcgctccagatcagactatcttgcaaaaaatgcctcacagcgactactttttatttaatgtgcttgaaattgggtatagtattctgctagtaattgggcaatccggttcccagtaatggcataattttcagcgggttggttagctaatgaaatccgcaagtagccatcatcagtccccattcctgccccatccatcacaacaacgccgtatttagctgcaagtttatcttcgaaatcaagatagctcacgtgcttttcgaaatagtcgtggaattcatgcccatactttctttcagcaaaatcatagatgttaaataccgcataatattcagcgttttctttagagtgatcacattccatgcccatcgattcccaaaaagcgttgtatcgcgcatcaaccattttcttggaagcttcgatgtatggatccttttcaccttcgtgaattaagctggtcaaactaaatagtgccatcaaaatttgttgtggtgttgataatcccgcggtgtggtacaacgcgatttcacgactgtcagccactgttcgatcaatgaatttcatcgcaagcggattaggcgccacaactgagtaccgtttttcaaaagctgccttaatcgctggttcttcagccgttcgcttagcaataatttcatcaaaaacattatcttggtgcactgctagtaagcctaaacgatgcccagttgccccataaagttttgaatacgaataaactaacatcgtatttcggggggcaattgagtaaattgtttggaaatcattcacaaaagtcccataaacatcatccgtaatgatgataatttctgggtttgcttcaacgacctctttaatcttagctaacgcgtgtttgctgaaagcccgcgaagtggggttcgttggattaaccacaaaaaaggctttgattgtcgggtccttcaattcttcaaacttggcgtccatcatttgccagttgtcatcttcaacggaactcacatcgaattgctttaatttatattcacttaattctgggatttgcaaataaggggtaaagattggggtattgatggcaatcgtgtcgccaggccgtaagatatggctgatcttcaattccttgaacaaataaaccattgcggctgttccgccctctgttgggaagacatccgtttgattagctaatttttcaccattatatagtgacacttcaaggtatttatttaggattttttccacattgattaaacttctcgaaggtactggatagtgattgccaatcgcaccgtcgacaaattcgtgaaccaaatcatcctgattgaggcccatgtgcttttcggtataatctaaaaaggctaatataaatcgatctgttttatgactggcatcaaggtaggcatgcagccgttgtgcaatccctgctttatcaacgtagcccgccatatctccatcagcctcgttaattttcttagcagattcttcgacgccaaattcgacaagcttattaaaagctaatcgcgcccgcgtattaatccagttagggtccccacgaccaacattaattggcgcattatgcattgtatttttttctgaattttctaagaacaaagcggcaacttcaaagtttgacatctcttttaatcgctcaatatctaatgagtgcatcgtttttccacctttttcaattacttgctacattcataatcgcatctaaaagcactttaacgctaattgacagtcaaaataacggctagcattgtaaatttattgtttgatttattatatcgtttttgtctcaaaaataaagcactcattcaaaaatcaaaccataaatgccacagcgattctccaacttcatattgcatcatttaccacaaacctgcaaccctgcggcgggattttttctaatgctgctaaaaaagcacatcatcgttcaacgatgatgtgctttttaaagttttaagcgacgttattccttattttctttgaagaacttcgcgaaatttttgcggtaattgtgcaacatccatttaatcaatagccagcgtttgagattcatatctttgctatattcaaaagtggtgccgtaacgtttttgtttgatgagtgccaatgccttgtctttttcggcattattgcgggcatatttcttaaagacatccactgaaacgcccaaccaaagtgcgggactgtcttcatctttattcgcccaaacaacaggttcatcttgcaagtcgtttgtcacgtaatcgcgcaccacccattgggctaagttatagccgttcaaggtaacaaagaaactactgcggcccatccgtaaattgatgtcgaataacttgtaggtgttatcgcgttcatcatatttcatatcgaggttggcataacccgtaaactcgatatcttcaaggaatttttggacttgttgataaatttgtgcgttgtattccggcaaaatcgccacgtaattcccaatagctgcgggtgctggatcttccaataatggatggcccagacacatcatcttcacgtgatgttgttggtcaacatagatgttcatcacgtgcatccgactgtcatccccaggaatgaagtcttgtaaaatcatgtctgattggtagccattttcatatacttttcgcatgatgtcttggaattcagcttcacttttaatcgtgaaagcttttttgcgcccttcaaaatgcacatcaagccattccacagaatccgccggttttaacgccactggatattggaaaggttgttccacctgattatcttcaaccatttgcttggtaatgatgtgcgtcttgggataaggtaagtcatatttgtcacagatttcatagaaggtttccttataagtcaacttttctagtaaatcgtgatcaatatatggacaaacaaagacatcttccaattccgctttatgttgtgaaattaagctcgcatagccatcaccacagccaatcaaaatgactgggccatcgctatcgcgatagatttcctttaattttagcatttcagtaatgaatccaggatcttcactgaagcctggaatcaattctaaatcgacgatttttgtaaaccgagttggtgctaattcctgacttgcgtaggccttaacaggttcatgatacatctcataaaacgaacgggccatcccgtaaacgttaaaatcgctccccaataaaatgggggtgaagtttttaccgtttgcttgcatgctgtcaccttctatatcaatatttatcgtagtataccagactgccgttcaatatacgtcagctcaggatgctctttgttaaaacttaattagtaattgctacttgttgtatagcccgtcgacaatattttggccgaccactgtcatcggatcaatcactttgtcgggatacaatggaaattccgactgtgcaacactcaattcggtacagcccaaaataaccgcgtcacaatcatagtcatttaacattgtatcgacaattttttgatacttgtcatggctgaatgtcccagtcgccttaatgtcatcataaatcaaactcatcgtggcatcttgcaatgtttggtcgggaacaacactttcaagaccaaaagcagcaattgctttttgataaataccggcttgtcgggttccggttgtgctgagaacaccgattttcttcaagccgggaattgtttgttgcatgtgtttgaccgtttcccgtggcatgtggataatgtcgaaatctgcggcagcttgtaattcgtcgtagaagtaatgggctgtgttacaggtcattaccatgaacttcggcgctaacaaattcatttggcgaatatcttttaacatcacgggcaacggattttcttggctgttgtcgaggatgtaggctgtgcgatctggaatttcagcgtggttgaacacgacgtaattcagataatcttgatccttcttagccggtgttaattcatcgattagatgtacgaaagtttcggttgccgccgtccccatgccgcctaaaatcgtaaacatttcttccatggcaattctcctttacttaattgacttcatttgatgctggttagtccttcttttgaggactcacttcgatacctaattcttctaattgttccggtgtcacttcactaggcgcattggtcattggttctgtggcccgggaatttttagggaaggcaatcacgtcacgaatattgtcgcgactagcgagcaacattgcgaaacgatccaaaccaatcgctaagccgcctgatggtgggaaaccgaatttcatggcatttaataagtggccgaaacgttcttgagccacttcaggggcaacccctaaaacagataacattttttcttggacttctggattaaaaatacggagtgaaccgccacctaattcataaccattcaagatgatatcgtatgaaattgcatgtgccttatgtggatcagtatccaacaatggaatatcttcatcacgtggacgcgtgaatggatggtgggctgcaatccatttgccaaagccttcatcatattcaaataatggccaatcaacaacccatgtaaatgcaaattggctcttatcaatcatatccatttctttagcgaagtgtgttcgtaagtaacctaagctatcacaaaccacttggaagttaccggcaacgattaaaattaaatcatcatccattaagttcaaacgttcaacaagcgcttcttggtaaggtaataagcctttagcagaagcccctgataatttatcaccagcgtatttcgcccacaacaatgacttagcgccgtaacgttcaatgtattgttgttgttcgtctaacgctttccgtgaatatttaggggcggcattattaacgacgattgcgcgcacatattggcctgcttcaacagcttcagagaatggcttgaagtcagaatcttgcacgatttctgtaatatcttgaatttgcatatcaaaacgaacatccggtttatctgaaccatacttgtccattgcatcttgccatttcaaacgtgggaatggtgtttgcacatcgatgcccttgacgtctttcataacttttttcaataaaccttctgtttcggtttgaatttcaacgtctgataagaacgttgtttcaacatcgatttgtgtaaattctggttggcgatccccacgtaaatcttcgtctctaaaacaacgggcaatttgatagtacttatcaaagccggctgacatcaataattgtttgaagagttgtggtgattgcggtaatgcgtagaaactacctggataaacccgtgaaggcaccaaataatcgcgtgcgccttcaggtgttgaactcgtcaagttcggtgtttcgatatttaaataaccattgttatcataatagctgtgaactgcacgagtaatcgcagcccgtgttttaatggcattttgcatttctggtcttctaagatccaaataacgatacttcaatttcaaatcttcagaagccgtattgttatctgaaatttcaaatgggagggtttcagctttgttcaagaccactaagtctttaacaatcacttcgattttccccgtcttcatgtctggattaatggccgcttcatcacgcgccatcactgttccttggacttcaacgacatattcactctttaatttacttgctacttggaaaatatctgcatctgtgtcttgattaaacaccaattgaacgatgccttcgcgatctcttaaatcaacgaaaattaagttcccaaaattccgttggctttgaacccaaccatgtaatacgacttcttggttgagaaattcttccccaactaatccacaatatgttgttcttgttctcatatttgccaatcctctctgaatctacattttataaaaaataaaaaaagcaccctcgtctttcgacaagggtgctttgcgcacggtaccacctttaatttcagctgttgataacgctatctgctagcgggatattcatccaagcctcaaaagctgtcaactggaatcaataagtaactttcaacggggttactctctctgtgattgatcgctaaaaccaagtactttatcgatggctacattttattataatgtccaaaatatatcacaaagccctttaaccgtcaagttttgcagttggattgagctagctggattcgaaccagcgcatgacaggatcaaaacctgttgccttaccgcttggccatagcccaataatgcggcaccaagattaagttggcgccgtaaattgattgaattgaaacgtgctttcattaactgctttctgcgttttgctacgtattgcaaacaatcagctgtgctgattattcacaacactagacaagtgttcaaaagcaacccgttaatgacacactctaaacgtgctttggcagccatcttcttccggttagctacatcagtcaaatcaccgactttgtcggtaatctgcctgattaggctaatcctcagaagataaccgactgcctgcgcactctttaaattaccatacaaatagtccgactgttgctgctgaaagaagtgatactaagattcctgatagcaacatgtagccgacgtttttggcaatcatgtcgttcttttcacggtccacaaggcctttgaaggcgccgatgatcatgccgactgttgagaagttggcaaatgatgtcacgaagaccgttaagacagcttggtaatgtggtgcgaagctcccgattgaatgttggactttacccatgacaacgaattcgttggtcaccaacttcgtccccatgaattgtgcaaattcaaaagcgtggtgcacatcaagtcccattaaccatgcgaatgggaacatcacgattccaagtaaatgttcaagggtaatccaagggttcactaattgaagcaccttgtcgatcaaggcagccaacgcaacaaaggcgatgacgtttgccgtgataattaaaactaatttaccagcatttaagattgaatcacctaagaatgagaagaatggttcacgttccactttgccttcaaccatttcggttgcttcaacagctgcggaaccactcccacccattttagcaatcgtatcttcttcgggtgtgactttcactgggtttaaaatattggtgacaataatagcgttaataatgttgaccggaatcgccgttaaaataaattggcccggcatcatttgtgtatatgcgccgatgatggaagctgtcacacagctcattgacatcatcgcaagtgttaatgttcgttctgctttcatttgtttcaattgtaagcttgaaacagctaatgcttcggtattgcctaaaaacatcatttcaactgcaaagaatgattcaaactttggttgtcccgtaatcttagctaacccacggcctaaccatttaatcacccaaggcaagaccccgatatacgttaagatatcgaataatgggataatcatcaagattggtaataacacgctagcaacgaaatccatttgtttcacattgacccaacttggtagtgcaaaagcaatcccagtataggcaacttgcactaaccagttaaagccgtttgctgcacctaaaacaatatcccgcccgattgaaaaactcgttaaaaaccaagcaagcactaagttaatcactaacatgattaagacggagcgccaatcgatttctttctttttctttgagaacagaaagccgactccaataaaaatcagtaatccaacaacatttacaagcaaatacacgacacgccacatccttcatttgtctttttcgtaccgctttaaataataccgttcccccttgtaaatgtaaactattgttcaccccctaattgcataaataatcacttgttaaacgcaactaaattagtctacaaaaaaagcggtccccttttgcaaaggaccgcttttccattcatttttaatagcccgcattccactgatttgtagactgttgcgtttgccaagtattggtcgtgttactgtaatcgttgttaccactataagttgcactgttcgagtagccatagttactttgcgtcgtcgttgcagcactcttttcaccattcatgacactttcagaataaaccgtaaactcttgatgattttcttcacctgtaaagttggtattcaaatcgttttgtttggtttctgcgttgttaatcgttgttttctctaatcccagtgacgttctcaagacatctgaaacgcgttggatttcttcattggttggaatctgatacgaactaccattaatatcagcattacgtccagttaaaacatcagactcaattgatttagctgcctttcgataatttgcttgaatcgctaccatgtcatcaaaactgaggttagtggcaacactatctgacaaggagtctaagatagattcaaagttggtcaaagatttaagcgagactgcagaattaatcatagacgtgataacttgtttttgccgtttttgacggccataatcgccttctggatcatcgtaacgcattcgtgagtagtctaaagcggcttttcctttcagatgcatcttgcccttagtaaactcgctcccgttccattcgaacgtaaatggtacgtcaacatcaacgccaccgacagcgtcaacaatcttcgataagccccccatgttaaccgtgacatagtaatcaattgggacatcgaacatcttttcaaccgtcgacatcgccatatcagaaccaccaacattataggcagcattaatcttctgcatgttaaattcatctgcgccttgtaactgcgctagcgtatcccgaggaatgctgaccaacttgacctgctctttatctggattgactgtcgccacaatcattgtatcggaatttcctttatcaactcggccctcagcaccagtatccactccgagtaataaaatagagaatggttttttatgtttaatcgttttagcggcttttttagtcgcatttggtttataaattttattcgctgcagacttcacttgattactgatgcgtaatgcatacgcgccgccaccgaagaggactagcgttagaatgagtatcaaaactttcatcgtgcgatgctttttaacttttttgtagtttgcttctcgagatccgaaaaatttagaattctgcataggtgtttcccttctattatgtatcataccggcattaataatgttatgttgctattatagcggaattatcatttcaaacaacgccttttaagaaaagttacacaattttaataattccttcaattgttgaacaacactttcctaagcgcttttatgctaaaatgtaagcaagtcttaattatggaggtttcatatgtcaactcaacaactccccatccgcgatgctgttccagaaaagctcacatgggacttaaccacgattttcaaaaatgatgcagcttttgaagtagcctttaagaaagttaaaacgcaattacccacactcaaaacacttgatcgtccgtttgaatcggctgatcaattagtcgctacaatcgaacaaatcttagccactttccgccagctcgaaacaatttacgtttatgctagcatgaaaaatgatcaggatactgctaacgcaacttatcaaggctatcaagcccaagtggacagcttagcggccgaagtttcagccgccgctgctttcttagaccctgcgattctcgcaattcctattgttcaattgaccacttggttgtcagaatcccctgctttagccaaatacagccatttcattcaaaccattaccgatagtcgagaccatgtcttatctgggcaagaagaagccttgttagctgctgccggtgatatcttcagtgctgctagtcaaaccttcagcgtcttagacaactcggatttacaattcccagaagtgactgacgaaaacggacaaacgtttcagctttcagacggggtctacagccaacttttgcaatcagccaaccgatcagtccgccaagcagccttcgaagcactttacaaaacttatggtcaattcaaaaatacatttgcgacgacgcttgccactgaaatcaaaggtcacaattacttagctcaagtccatcactacgatagtgcacgccaagcagcgctagcacccaaagcaattccagaagccgtctatacaaccttggttgatcaagtgaaccaacacttaccacttttacatcgctatactgaattacgcaaaaagcaacttaatttatctgaattacacatgtttgatctctacacaccacttttaggaaaacccgcattaacctacacttatgagcaggcgcaagcaactgccaaagaagcattgtcgatcctaggacccgattacgccaaacaagttgcccatatttttgatgaccgcttaatcgatgtttgtgaaaaccaagggaaacggagtggcgcctattctggcggcgcttatgacaccaaccccttcattttattaaactggcaagatgatttaaacaacttatacacattggtccatgaaacggggcatagtgtccacagcgccttcacccgtcagacccaagattatgtttatggcgactatccaattttcgtggccgaaattgcgtcaacaaccaatgaaaatctcttaacggaatatttattgcaaacacagtctgatcctaagatccaggcctatctactaaactactatttggatggttttaaaggcactgttttccgtcaaacgcaattcgctgagttcgaacatgcgatgcatgctgccgctgccaatggtcagccactaactgccgagttcatgtcacaacaatatgcggacattaatagccgctactacggacctgccgtcgttaacgatccacagattgcccttgaatggactcggattccacatttctacatgaactattatgtttaccaatacgcaaccggctttgctgctgcaacgactctcgctaacggtattagcaccaaacagcccggtgctctcgatcactatttagactacctaaaagctgggagctccgcctacccaattgaaattatgcaacaagccggcgtcgatatgacgagtgccgactatctcgaacgcgcttttgcagttttcgaagaacgtctggatcaactcgaagccctacttgctaacctaaattaagcctcatgaaaaaacgtcctcaatgattgaggacgtttttttaacggctaattcgtcgatgatataacaatgcaataaagtaaaagccaaactcaatcgtggcgatgaagaaggtcactggccagttcgttagataaccaagccataaaccgagccaaacccctaataacgctgtggcaaccgagattgccaacatcccgggtacgctcttcgctaaatatttagcaatgaacgccggaatcgtaactaagatgaatactagtaatgaccccacaatctgagcagcaatgctgacactgacggctaataaaattaagaaataaatcgatagtaagttggtctttaaaccttgtgcttgagcgccaatcggatcatatgaatcaaataccaagtaccggtaaaagatcaacagcccaatcataattgccccagataagatgattaattgataaacatctgctaagctaatgccaataatcgaaccaaataaaatattggtagcataactagcatttcggtttgaaagggataaaaagagaatcccaaaaccgacaaacagacttgaaatcgcactaatcgacgcttctcgccgtgattctttggcactcatctgaccaatcgtgattgaactgagtaacgtgaacaataacatcccattcaatggtgcaattcccatgaaaaccccaaatgaggctccggcaaatccaatttcagatagggtatgcgctagaaatgacatgttccgcgcaacaacaaataccccgattaaaccgcaggtaattgcgataaaagtactggcgacaaaggcatgccgcataaaatcaaaagttaacactcgcttatcctccgctttaatctaattccaaattgggatccaactgactcattggtccggcttcatattgacctcgttttaaaaataggtattgatccgtgtatttccgggctaattctaaatcgtgggtcacaaaaataaccgtcaaaccatgttcccggttcaactctgcaaccaaggccatcacttcttctttagtttcaatatccaaactcgctgtcgattcgtctaaaatcaataagtctggtttactgattaatgcttgggccaaatacgccttttgcttttcaccaccagaagcattccccacggtcgtcttttgcaacgcggttagatgggtctgttctaaaatttgatcaagcgcttggcgttctttgcgcaatttccacggtaagtggctatcaagttgattcaaactcacaaaactacgaatggacaacggatattcagcttctaaatttctaaactgtggcacataaccgatgtttagcttttgcttatccgggttaaaaacgagttgtccttctgtcggttgtaaattaccgattaataggcgcaccaaagttgttttaccaaccccgtttggaccgattaaactcgtcatgctaccacgttcgatcgtaaaactgagatcttttagtacttgtcgattactaaaggcaagccctaaatgttgtgcattcactaattctgtcattttgaatcctgagcctttctaactgcatcaaattgctgttgcatccatgttaaatatgtttttttagcgggtagtgtttcagttacttgtacaactggcaccccttctttatccgctagttcgtgcatttgtttaataatgggactttcttcttgcttattaatcactaaaaaggcaatctgatgggttttaattaaatcccgcatcgttgtaatatcttttggtgatggatcggtcccatcttcaattgctttggcaaagtgttggttagcgactttgtaacccatttcagccaatgcatagtcaaaaacgggttcactaacagccacttgttttcctttggcctgcgcctttagttgttggagttgtgcgtctaacgaagctaactttttaagatacgccgcaccattttgctgatacgttgccttatgtttcggatcgcgcttgctaaattcagtcactaatcgcttggtcaatgttggcatcgtctttaaatcataccataaatgttcgttagcgccattagattgtttcattaattgactgactgtcaacacagtttggtcatctggttgggcactcttaacgactttgtttaaccagctgtcgtaaccaagcccgttttgaatcacaatatccgccttagccacgagtttagcatcattggttgttgcttcgtatgaatgtggatctagactgggactattgataatcgacgtcacgtgaccttgattacctaaaaccgcttgtgcagcttcaccataaaaatcgagtgacgatacaacttgaatcccactcgccttttttgtactctgaccacaaccagccactaatagcattagcagtaagattcccgccatgattcccaaaccttttttacgcatctttttctcctcttttctaaatcgtaattattacgttttactaaaaatattttacacgagtctcactaattgtcaatcatttttctgaaaacacttaaaaagggattgggacaaagattgcttttgccctaaccccttttttgaattgttgaactttaaacgtgttctgtaagtcattctcctccggttaaccctgagtcgcaaacaattactgcgtaattattcacgccctgtgttaatcctcggagcatcgacttaagccacactctttaattaccagatttgttccactgcacctgttgcttggacaacaaaataacctgcccgtggttgatcttcgtttggtacgtaaatattaatgagatagccttgttgcccaccgcgtgtgattaagccattattcaaatacgatgcggtttgaccaaattgtgagccaacttgttgaaccaccaatttaatcgcttggttgccatctacggcagttgtttgttgtggtgtcgtggtagtcgttgttggtgcactgctgctagattggctcgcagattgactactgctacttgccgttgtagcagttgatgatgattcagcaacacttgcagttgatgaacttccttgtggggactctacttcagttgaagatgccagcgccgctttggagctcgcttttaattggcttgcactacttgaaagttcactttcgcgttttgcaacgctactttcacgtgctttaagactagccgtggttgaactttgcttggcatcagcatcttgatttgccgtactactttgaccacaagcccctaataatagtagtcctgataccaaaactgtactaactgtaaccatctttttcataataccccctccaactcctattgattcatctttattctacgagacccacctcagaatagcaattaaatccacatctgatttaaaaatctttaagaaacacgctgattagcttaacttagcagccacttgcttggcaatcaccatatcagttgggtatggtgtatcgaccccgcgtactttctgataagcatcggcccctttagccgctaagacaacaatttcgcccggtttactttccgtaatcacctgttcaatcgctgttgcacgatcaatttcgatggtggttgtcaccttatcctggtcaatccctgccaaaatttcagcggcaatggctgctggatcttcaaatcccggatcatcagtcgtcaaaatggcccgatctgcatattcattaaggacctgtgcaaacccagcacgtctagaaacacctttatcgccaggactaccgacaacaactagtaggcgtggttgattgtattccttttgcaagaagctcaagagcgccttcatgctggcataattatgcgcgtaatcaacatatacttgaccatgtcctggaacggctaaggtttccatccgtcctggaatctgcaagtcgcgaattccttgttgagctgcgattaaatccgcccctgccaaaccagcaccaatcactgcagctgtcgcgttgctttcattgaaatccccaattaaacgcagttggtaatcaccagaaacaccaagttgaatggctcgttcagaagccgcggtaactttaaaccgactttctgctaagcccgtttctagattttcaaagcggaaatcaaccgccacgggaattgtaggttgataatccgtttcggcaaataagtaaattgattccggagcagtcgtcgtagttgctgcagcatacacatccgcaaaatattgtgtttgcgcgttaatcacacagtgtcgtgagttgaccaataattgtaatttgcagtgtaagtaatcttcgaaattaggatgttcatttggtccgacgtgatcaggcgaaatgtttaggaagaagccaacatcgaacgttaagccgtacactcggtttttcttatacgcctgtgacgaaacttccatcactaagtgcgtcatcccgttttcaactgctttgcgcatgtcgcggaataaatctaaactttctggtgtcgttaaatccgatttgaagcgatcctctggtttaggccctaagacacgatcaattgttgaaaataatgctgttttttgacgggtcgccgcttgtaaaatcgattgagtaaagtaggccgcagttgtcttgcctttggtcccggtgtaagccacgataaataaatcatcttgtgggtaatcataaaaagccgctgataaaaccgccatcgctttttggacgttcgtgacgattaaggcgttcatcccgttgccttcaacaatcgcttgttcggcaacatatgttacggcccctaattcttttgcatttgttaaatagacgggacgaaaattccctttacagaaaaagagcgtatcctcagttacctgccgtgaatcatacgcgatgccggtcatatttaaagtcgggtcaccattaagcgccacacttttcaataaatgatgctcttttagaattaacgtacatgcatctaatgttaaagccattttcgtcctcctcaaaatccttgtgaatggttttaattatagcacgatttaatcatgctgcgcttgaaacggcttataatcgtagccataaaaaaacgcgccaccgttaagtgtcgcgtttcaattccaactaaaataggttcgtgaaaaattctttgatcccttcaccgattaaaacaaataaattggctttggggtccgccgttttagtgcgtaattgtgattgtggcgcttgtccgatataccgcgtagtgacaccgttcaattgtggtgtcacttgaccaatttgcacattctttttaataggtgcttccaattggcgttttgcaccacctttgactgcttggtaatgccagtcaatgttggctgctgtggttccttttggcacccacattgaaatagctttgttcgtaatcaattgcattgtcttttggcgaccatatttaaccgtcgctgtcttataaggtgcgagactctgattggcttgtgccaattgtttttgttcccaaccatcgaagacatattgcattaacttgttagtttcaatgaaccgccggccagtatcttcaccattggcatgcatcaccactgttagaatccgttgcccatctttcgtcgcagttccggtaaaacaatcgcccgctttgtccgttgtcccggtttttaaaccatcgaccacgtagtcttgcggtgcattattttcgccaggtaacattaagttccacgttgacatggccgtttcatcacttgtttgggcgccaaatgtaaaatgcgcttgcttggttgtttcgagaatttcaggataatcagccaacaacttttgcgctacgagtgcgacatctgccgcactcatttcattttcagcatcagccggactgcctggataaacttcagcgccgaggaattcattgttcaagccggacactgaataaagttgtgcgtcttgaatgccccaatccgccactttttgccgcattaaatcgacaaaatccttttgtgaaccggccacttggttggcgagcatcatggctgcatcattcgccgaagcgaccatcatggcttggaaaagtgccttgacggtatattgtccgtccgcttgtagaggcacattcgttaaatccttattttgactcaattgataaatgaggtcatcgggcttcaccgtttgttcccacgttaacttaccttgcttaatttgcgctaacacgatgtaggctgtaatcatcttcgtcatcgaagcgattggcaacgcctgatccgcattttgttcgtataagacttgtccagttgctgggtcgagcgcaattgctgcactcgcatcgatttgaggggcggtcggcaaactcaccggcgtacttgccgctgcgactttggtagtctgggcactcaaaagaccgccaacgggtgcaattgccaataggccgaccattacatattgtactaattttttaaacacaacattactccttaactgattttgcgccagcagtttgaggatcaatccgccgacctaacttcaaaggtaagtgtatcacaaaactggttaattctggcgtcgaatcagcataaatataaccgccatgtaacgcgacaatactttgggtaattgctaacccaagtccagtgccacctgtttcttgtgaacgcgatgcttcaacgcgataaaagcggtcaaagagttggttcaatgaatcacttggaatttgttgaccatcatttgacactttaataatcgcctcttgaccgattttttcagccgccaacgtaatttgtttgccacccttgccatatttcaaagcattagcaattaaattattgaagactcgaccaagcttttcagtatcggcttccatcatcagtggtgcaggattacaagttacattaatctgcatccccttcttattcgcttctaactcaaaactggccgctaattgatctaacatctgctccatatcaaacgttgtcttggtaatgggagtcgatgtttgccgcaccttcgtgtattcaaataaatcctcgactaaaaccttcatttgttgcgccttcacgaaagcagtatgcgtatatttggttagttcttccttggtttgatactgattatcttcaattaaaccaagatatccgatgattgaagtcagcggcgtccgcaaatcatgactgacattggtaatcaattcgtccttactcttttcaatcttgcgttcttcttccattgaacgcaccgtgctgtcaaccagcgtgttcacactatcgatcacgcgttgcaaatcccggttgacacgcaaattaatccggtggtccaaatgaccatcggcaatataatgcaactcaccaatcacgtgccacatctgcatttgatggtaacgccgaataagccgccaatagacgactaacacatcggcaacccccatcaagatgacaaaccaattttgccaactccaaatatgccattcattcggaccaattgtaatggcgtttttaatcatccatacgccgccgcttagttgcggattattcacaatcgcctgttgtaacagcaccatgattgataaatttaatagtaataacaaaataaccgtgatgatgccctcggcaaagagttcgctcttttccttagcggttagtgccactttttgcaggttcttttctccttgatagtcagccattaaacttctaccttatacccaacaccccagacggtttcaatcactttttcaccatcggttgcttcttcaattttgtcgcgcaaatgacttacatggaccatgaccgtcttggcagagacgatactttcttgtttccagacccgttcaaaaatatcgtccgctgaaaagacccggttggggtgactggcaagtaagtataaaatcccaaattcaagtgcggtgagttggatctgcttgttattaatcgtcgtcacttcatgtgagtcgcgcttaatgataagcggaccaacttctaagacatccggcacttcgttggccacttgttgttggctccgccgtaacaatgacttcacccgcgccatcacttctaatggattgaatggttttgaaacgtagtcatctgcaccggttagaagaccttgaatcttgtccatatcagttgtcttggcagacaccacaataatgggcacttgtgaatccttgcggaccgccttgatgacttcgataccactcatattcggcatcataatatccaagatcatcaaatcaatatcgggattcgtggcaattttagtcatggcttctttacccgtgaaggcttgaatgggttcgtaaccttcatttttaacataaatacttaataattcaacaatttctttatcatcgtctacaattagaattttcataatcgttacctcgtttaatttaacatcattttgcatgattcgctttcattgtaacaaactatcttctacttagggttaaagaattctttaaatcctccccatcatttaaccacaaaaaaaggatttaagtcgtgcaaaacgctcgacttaaatcctgataaaaatgatttgaattaacgcgctgaatagttaggtgcttctttggtaatttgcacatcatgtggatgtgattctgtcaaaccagcatttgagatttggacaaattgtgcattatcttgtaggtcctgtaaattagcagcaccaacgtagcccatccctgaacgtaagccaccaagtaattggtaaattacatcgccgagtgcgcctttggcagccacacgaccttcgatgccttctgggactaacttgttggcttcattcacaccactttggaagtaacggtctgatgaaccatgcgacatagcagccaagctgcccatcccacggtatgttttgaaacgacgtccttgatagatttcaaattcgccaggtgcttcgtcagtcccagctaacatactaccaagcatcacaacgtttccaccggctgcaagagctttaacgatgtccccagaatatttaatcccaccatcagcaatgatggttttgccatattcgcgggcaacactggcagcatcgtagatggctgttaattgtggtacaccgacaccagccacaatccgagttgtacagattgaaccagggccaatccccactttaacgacatcaaccccagcatcatacaaggcttttgtgccttctgcagttgcgacattcccagcaatcaaggttgcttcagggaagcgttcgcgaatttcactaatcttacgtaacacaccagctgaatgaccatgcgcagtatcgataatgatcgcatcagcccctgctttcaataaggctgcagcccgttcaaaagtatcgcttgtgacgccaacagcggcagcaactaataagcgaccatattgatccttagccgcattcgggaattcttgcactttttcaatatccttaattgtgattaatccggctaagcgaccgtcatcaccaactaaaggtaacttttcaattctgttttgttggaggatttgttcagcttcttctaaagaagtgccgacaggtgcggttacaagtgcttcgtgcgtcatcacggttccgatttcagcagagaaatcagagataaaacgtaaatcacggttcgtaataatgccgactaattttagatcatcgagatttgaaacgattgggacaccactaatacgatatttacgcatcaaatcttcagcagcactaacgggtttatccgctgttaaataaaatggatcaataataacgccattttctgaacgtttaaccttcaagacttcatctgcttgacgttcaatactcatattcttatgaatcacgcctaaaccaccttgacgcgccatagcgattgccatgggtgcttccgtaacggtatccatgctagcactcataattggtgtgtttaacttgatattctttgcaagttgcacccctaaatcgacttcgttggggagtacatgactctccgcaggtattaataaaacatcatcgaacgtaaaccctttttttgtaaactttgattcccatgcagacataatattcctccaatttgtgaactaaattaaccgccgacccatcgattgttcgtattatctttaatcgataaccagtttaaaatttgataaaatattagcagatttttctgcaaacgtcaataaactcttattgaaaattcattttcatcaatatcgtgtacgaatgaatcacgaacatttaaaataagggtgcacaccacccagcttcgttatacaatagaaataactgattataaaggatggattggcatgcaagaacaacaacgggttctagatttaacacgaagttataacctacgcgaattaggcggttaccaaacggttgatggcaagtccgttaaatggcacaaattattacgttcaggtagtttgaacgcgctaaccgcaactgatattgaggatctcttaaattacggtgttgcttacgatgtcgatttccgttcacgtcatgaaatcaaggtcgcccccgacccatttgatgacaaccaactaacctaccatcgtctttcggtatttccattcactgaccaagccgatacccctaaaaagccagccaaaaaaggcctaatgcggctttttggtaaaaaagaagctgctactcccgaacgatcaagtatggaccggatgtaccaacaattggtcaccgactcccatgctcaagcaacttatcgtgatttatttaccgtactattaaataatcacgatacaaacggtgcagtcctttaccattgctcagccggtaaagatcgcactggtgtcgcaacttttttaattctaagtgctctcggcgtcgactggaaaacaatcgttgccgactatgtcctctcaaatgaggtcctaggactcagctcagcaaccccaacccgaatttcaagtaacgatagccaggtcgcttcaatgaacgctaagagcattacacaggctaatctagaacttgtccgcgacacgattaatcaagaatacggcaacatcgaaaactacctatcaaaggcaatggccctcaaaccagaagaaatcaaacaattaaaagaggactacttagaatagcgtgcgactgcaaatggttatccgctgaggattagcctaaaaaggcgaacacaagcaattgtgttcgcctttttgaatgatcttttaatgactcttaatataattttcgccatccgctgctggtgcgacggccttgcccaagaaaatcaccagaataataatcgtaatcgcgtatggtgcaatctggaaccagacactattcacaccggccagtattgggatgtagccgccgataatcggcaaactttgtgcgagtccgaagaaaatcgatgcacctgtcgcgccaattggatgccacttaccaaaaatcatcgccgccaatgccatgaagccctgacctgaaatcgtcgctgcgctgaagtttaacgtaatcgactgcgccatcaccgcgccaccaatgccgcctaacaaaccagacaacatgaccccgatataccggtaacgactcacattgatgcccagtgtatcggctgccgctggattttcaccgactgaccgcaagcgcagcccaaaccgcgttttatacagcacataccaactgataatgccgaccaaaaccgcagcgtaagccactaacgacgtcttcgtaaataaaatggggccaatcactggaatttgggccaagccggggaatgtgaagttaccgatgctttgattaatcaccggcgtttgccccttaccgctatacagcacacgggttaagaagacacacaatgcaggcgccaataggtttaacaccgtcccactaataatgtgattagcgcgcaatgttacggtcgctaaagcatgtaataaggagaacagtgcaccaaacagtccaccaaccaataaggcaatccacggcgtcaatccgccaaaaaccgtactaaattgaagggtaaagacggcactgctgaaagccccaacaatcataatcccttctaaaccaacattaatcacaccgctatgctctgaaaaagcaccacccaaggctgtaaaaatcaatggcgccgcgtaaactaacgtggtcgcacaaatcgtcattaaaatcattgtgattgtcattatttttcaagcctctctttcatcaacgcgtgttttttcagtaagcggtgattgagtaattgttcaaataagaagcgcacacccacgaagaagataatcgatgcaatcacgatattgacgatttctgtcggagttgttgagtagacggaaatgcttaagccaccaatctgtaaagcagagaataaaatcgccgcaaagataatcccgattggatgcccattcgctaataacgcgaccgccattccattaaagccgatatctggtaaggcatttgaaacggaaatattttgataattccctagaccatcgacagcccccgctaacccagctagtagtccagataatagcattgcccacataatcgtttgtttcgtattcatccccgcgtaacgtgcagcttgttcgttcaatccaactgccttaatttcaaatccagtcttcgaccgtttcaaataccaccacatcacaatcaccaagactaacgcgatgaaaaagccccagtgaaacgttgagtgattggtaatctgttccaaaaaaggggtccgcaagcttgctttagggacaatgttggccgatgagtcgctgccttttggcgccaaccaacgtttaatcgcaaaattgacgaaatacaatgcgatgtagttcaacatgatggttgtgatcacttcactggtcccaaagtatgcccgtaaaaaaccggccaaccaagaccaaaagccaccgagcagcatccccgctaaaatcgcgccaagaatcaagagaatccccggtaaatttttaaagtggagtgcaaagacaatcgcgccaaaccagcccactaatagctgacccgacccaccaatattgaaaaagccggctttgctcgcaattgaaaagccaagggctgtcaaaattaacggagtcgcattgcgtaatgtctcgccaatcgaatagatatcgccgaatgcgccattaaagaggttactgtaattttgaataggcgaatatccaaaaaccaacatcacaactccgcccactaacagtcccgccacaacggataggattgcaatgattaatcctgaagattgttgtttattcattcgtctcgccctcctactggttgttgcccggccattaataatccgagcgtctgactcgttgtggtttgtggatcaacttcaccaacaatttgaccggcgtgcattacaagtactcggtcagctaactttaaaatttcatctaattcaaaactaacaagtaaaatcccacagccttggttccgttgttcaatcaagctctgatgaatgtattcaatcgcacctacatcaacaccgcgggtcggattggcagcaatcaagacttttggttgtttggcgatttcgcgcgcaaccaccactttttgctgattgccacctgaaagttctccggcaagcgtttgttcagattgcgtccgaatgtcgaatcgtttaatcagtttctgcgccgtttgattgatcacccgataattaagccagcctagatgactatacggttgatggtaataatccttcagcgctaaattttcagcaatcgacagtggcaaaatcaaaccgatattctggcgatcttctggaatgcaccctaagccttgttcactaatttggcgtggtgtccgtttcaataatgactgacctcctaattcaatttttccagactgcggttttaattgtccggttaaaacctgaattaactcactctgcccgttgccatcaatcccagcaattccaacaatttctcccgcatgcacggtcaatcccagatcatctagaacagtgcgtttagcaacacgagcagcgacatgttccaccgatagcatcacagcgccttgattagccattttcggtgtgggggcttgttgcggacggccaaccatcatttccgctaattttgtcggatccgtttgtgcgactagtaccgtatcaatcacacgtccggcacgaatcacgacgcaccgatcagcaacttgtttaatttcctttagtttatgcgtgataaaaatcaacgacttcccttccgcctttaacttctcaaaaatggcaagcaaggcttgaatttcattcggtgtcaaagctgcagtcggttcatcaaaaatcaatgtcgttgcttctcggtaaagcgccttgataatctcaacccgctgttgcatcccgaccgaaatatcagcgatttttcgatcaaggtcgagcgccagttggtatttatcgactaaagccgtgaccttttgccgcgccgttgcatagtcaatccggccctgtttagttggttcgtcacccaggataatgttttctaagaccgtaaaagccggaattaacatgaaatgttggtgtaccatcccaatcccgagggcttttgcatgtcgagggccatttaaggtcactgcttgtccgttcaccagtaattgccccgcagtcggctttaattgtccggtcaaaacacccatcaaggttgatttccccgcaccattttcaccaagcaaggcaaggatttcaccctgttgcaaggttaatgaaatatcatcattggcggtaaaggcgccgaaccgttttgtaatgtgctgcatttctatcacagtttttgccatttttacgctccattcattaagcatacaaaaaggatggctgataactgctgccatcctttagcattcaatagtcgttattctgcagcaactttaatggtgcctgattcaattttttgttgatattctttgactgcttgccatgtttcaggggaagcattgtcgttcactaaggcaacgcctttgtctttcaaatcatatgtgacggttttgccaccagggaatttatcattcttagcttggttagcaagatcttccactgctgtgccaacttgtttaacggcagatgctaatgtgacgttgccaccatcatatttcccatcggctttttgatcttgatcaacaccaatcacccagactttttgaccacccttagaaatgttcttagcagcggtaaagacgccagcgccagtgccaccagcagcgtgataaataacatccgcgccgttgttgtacatcgcggttgccaatgattggccgacatcggctttcgtaaatgaaccagcatatttcacatcaacggtgattgctgggttaacggctttcaccccttgtttaaaaccagcttcgaatgttttcacgacggcactatcaattccaccgacaaagccgactttattcgtcttagtggttttcgcagcggcaaccccggctaggaatgatgattgttctgttttaaaattgacggacgcgacgtttttccgattcttaacgtttgaatcgatgattgcaaagttaacatttggattattctttgcagattggctgaccgcgttatctaacttatagccaatcgcaaaaattgtttggtattttgccttgattaacttattaatgttcgggaaaaagtccgcatcagaactcgattgtgcgtaattgtaaccattgaccccttttttaagatcatgactagcaccccatttttccaaaccttcccaggcagattggttaaaagatttatcatcaatcccaccaccatcagtgactaaagcggctgtgtgcgttgctttctttgatgctgtcttttgactcccgcacccggctaacacgccacctaatacaaggactgtcgagaaaagtacgaccaaactttttttcatgaaataagcctccgtcaataaatttgataatttattataaacacgttatcgacataaaatcaatacattgatttcattttataaaatattgttcgtttatattgtatttgttgctaagaaatatagataatgctaatattaattgataactaacgaacaatcaggaggcgaaccatgcaaacacaagtctattttaatcacgatggcggtgttgatgatttgatttcattaactctgctcctacaaatgccgacaatcaaactacttggcgtcggcgtaattggcgctgattcatatgtcgaaccagccgttagcgcgagtcgtaaaatcattgatacgttttcagatcaatcagcgcggttagctgtggccgcttctgactcacgcgcagtccatccttttccaaaagaatggcgaactgacgcttactcagtcgatgcacttcccgtgctcaatgaacgtggcaccgttcaaacgcctctgagtcctgaagccgcacatctcgatctaatcactaaactcaatcaagcaaccgaacccgtcacattgctctttaccggcccattaactgacttggcacgcgcactcgccatcaatccaagcatcgaatataaaatcgctaaacttctttggatgggcggttcttttcttgaacaaggcaacgttgctgaacccgattctgatggtactgctgaatggaatgccttctgggatcccgaagcagtgaaaactgtcttcgatacacaaatccctattgaattagtcgggctcgaaagtacgaataatgttcccttaacgccggcgattcgccaacgttgggctagcaaacgtgccaatgccatgatggactttatcggcacctgttacgcctttgttcctcaactggtccatttcaaaactaattcaacttattatttatgggacgttttaacaacttgttaccttcttgatccaacaatcgttaaaacaaaagccattgtatgtgatgtcattccaaacggaattgccggcgggcgcacgttcttaactaaaaacggacgtccggctaaactcgtctacgacgttgatgcagctggattttttgatctaattgaaaccatcataaaagcagactaacgcaaaaaggagcaccgacttatcagtcagtgctccttttttgaacgtgctttcatcaacagcttcctgtgctttgctacacttagcaaagcggtgcttgcagcgccaattcgctaagttaggcaaatgctcagaagctacccgttgatgacgcactccttttttgaacgtgcttgctaaactaggggaacaactttgtaaaggggctgtttgaatgacgactgatttcaatcaagaacaagcgcatctatccactgtttatcaacaattaaccaccactttgacggccatcaatgatgcccaatcgcaaaaccagaaaaacggcaacaccatcaaagcgcagatcaccggtgaagccaaactcaatttcgattcatacgctgataatcttgatacattcgctgctttagaaagtatcaacaaggaaatcgatatgctcaacctgaaaaccgattcgctcgttgcacgtcatgatgagaccttacggctgttagagcaaccctactttgcaaaaatcacgctgacttttcctgagaaaatagacgccgaagatttttaccttggttcagctagcttcacaaaccaagccggcgatcctgtgatttacgattggcgttcacctatcgccgatgtttattaccagcaaacattcggccccaccagttatcaagctaacggtcgcgccattgcggtcaatctcgaccgacggcgccagttccaaattcaagctgatcagctaatcgatttctttgatacgcagattgccatcgaagatcccttgttattagccactttaaaagaagccaaaacaacgcaaatgagcgccattaccgcgacgattcaaaaggaacaaaacgcgattattcggcaacaaacgactgaccatttactcatcgatgggattgcgggcagtggtaaaacatcggtcatttttcaacgcatcgcctatttcaagactatatcgcccaagttttaccagacttaggtgaacaaacaccagtcaacttaaccctacaacaactattggcgcaattgttaccttctgatctagccgcactccccatcgctgatcaaccagctactttgaccatcacacaattaacgttgcaggcgagcgatttccaatctttaagccctggtttaccgctgacgattgatgccgcaacaagctaccaattcttcttaaaaacaccggtggataccccgcttgataaacgaatacaagcaacccagcaacaactcacaagttgtctacaggaaagcatcacaaatgaagcccaatcagcagatgctttaactcaacttgaaagcctcactgaaaccgagcaacagcgcttattcgaccgcttaattcgcgaagatgaaccactagcaccgctagcacgcaaaatgattcgtcatgattaccaagacttagctgatcagctaagcggttatcaatggcttgcttttgatcaaataattgcccgtcaaacaccgattgatgctgttattgcagctcagatttatgcttatttaacgcatcacgtcttcccaaacgttaagcaggtctttatcgatgaagtgcaggactatcacgcaagcacgttatctctttttaaacaacttttccccaaagcacagttcacggttttcggtgatcagcatcaaagtatcaccccgcataaagtacaattcgaacaattacccaccatttttccacaactacaaactgcggcactgcgcacaagttaccgctcatccggtgcaatcacgacgttatttagtcaactattcaccgatttaacagatgtccatgccgttcaaccagcaggcaagcggccaacgacgatttgtgcgactgattttaacgactacctcacccaaatccaagctcagattgaccaactaccaactgaccaaaccttagccatcatcacgcctgctggtgactttgacgagcggttaaatggcctcaaaaatgtccaccacttatccacagaaacgacgaatctccccgaaaccggcgccttcactttaccgctgacgctggctaaagggttagaatttgataacgttttgttgtacgatctgactaacaattattataccgagccaactgtcggccgcaaccgcctctataccgccatttcgcgggcaacgcatcaattgacgctcagcgcactgggcaagttgccggttgaattaaatggccaataaattggtcatttgactgactaggctagtcctcaaaatataaacgctcgctgtcgcactctattcaaatacaaactgattgttgtacagttcggcgtagaagcctttttcgtctagtaattcttggtgactgccttcttcgatgatgcgcccgtctttgaggacgataatgcgatccgcattgagaatcgtctttaaacgatgggcaatcacgaaactggttcggccttggatgacgttgtccatcgctttttggatatgactttcagtcaccgtatcgacgttacttgtcgcttcatccaaaattaagagcgctggaccggtgataatcgtccgagcgatactgatcaattgtttctgaccggtactgaagatgttatcttcttcactgacagccgtttgataaccatcatctaacgtcataatgaagtcatgaatatgggcttgctgggcagctgccaccacttcttcatctgttgcatcgggtttcccgaagacaatgttgtcgcgaatcgttcctgagaaaagcacggattcttgcaacacgatgccgacgtgcgagcgtaatgcatccaaatccatttcacggatatcaatgtcatcaatcttgactgcgccttgatcaacatcatagaaccgattcatcaagttcatgacggttgtcttcccagaaccagttggaccaaccaacgcaatcatttggcccttatccacttcgatattcacatcatgcaaaatttgcttacctggtaaatagctaaagtcgacatgttccatggtcacggagcgttcaatgccctcaaattgcacaccgtcggttggacgcacttcatcgtcttcatcaaacacttcattcactcggcgggcaccggtaattgccaattgaatcatgctgtaactcgatgaaagttgtgcgatctggttatagaattgttgtgaatattgaacgaatgttacaactaagcccaaagcgatcgactttttaatgtcaccgttcaccgctaaccagctaccataggaaatcacaattgcggtattcaccaacgacatcccttgcatcaacggaaagatcatcccagaataaatctgaccttttaaagtcgccttgcggacattttcattatgttcaatgaagccatcaatcgtttcttcttgaaggctgttagtaataatcactttttggcccgtgattttttcgttaatgtagccattgagtttcccgacttcatcttgttgcacattaacgtatttttgcgctttattaatgatgatccaagcaaggatgaatgaaattgggacggaagcaattgtcacccaagcgagctgcacatcttttctaaacatcataatcaataaaccaattaagagcgccgtgcctgatacaagttggctcaacacttgattcatcgcattgtaaatattatctaagtcactcgtaaagcggctgagaatatcgccatctgaatgacggtcgaaatatttaatctgcattttttggagcttattgaataacccaatccgcatccggttggttgataacgcgttgacgcgtgagaaaaccgcgcctgataccaacgtcgctgctgaactaaagacgtagaataaaatcaacgatacaatcacctctacgaaggcgtctttagatgccccactggttggcaaatgttgggcttttaaaatttgaaatttcgttgcatatttgactaactcattgagcgcgtccccgatatattcgggtgctttcacctgaagataagtcgcaatcacagtcatcacgaggatgattgcaaaagaaggtttataccgctttagataatggaaaaagaacttcattgctcggttaaattctcgcattggttatcctcgctttcctttttgcgtttcaaagatttctcgatagacatcactggtttcaagtaattcatgatggttaccaacaccgactaaacgaccttcatctaacactaaaatccgatccgcgttgaccacagatgaaatcttttgcgcgataattagtgttgttgtgccagctaattcacggtctaacgcctctttaactaatttttcagaccgggcatctaaggcactagtactatcatccaaaatcagaatcttcggttgcccgattaccccccgtgaaattgagagccgttgtttttgaccaccagagaagttcgcactgcgttcttcgacggttgcatcatattgatcagcaagcttttcgatgaactctttggcttgggcaatccccgttgcgcggtccatatcggcgtcatccgcatcttttttcccgtgcttcaagttttgtgcgattgtgccggagaataaaatcgctttttggaggacaaatgaaacggcgctgtgtaaattatgttcgtttaaatctttgattggcacgccgccaattttaatctgcccttcagtcggatcgaacaagcgcggaatcaattgcgccatcgttgacttaccggccccagttgcgccgacaatcccaatcatttcaccagcgttaattttgaaattaatatctgttaacgtgttacgatcgtcttctggataacggaagctgacgtgatcgaattccaacgtccccgctaagtcttgatcagggacatctggataaacgatatcaggctctgttgaaagaatttcttggagtcgcttcaacgaaactgccccacgagatgccatcatcatcatcatgccgcccatgatgatcgacatcatgatttgcattaagtaattcataaatgaggcaatcgccgcaatcgcttctggatccgtatcgactaagtttccaacgaaatagattgatgcgacaaccgctaagttcgccaccaacatgaacgctggaatcatcacagaaaaaagcatcccgacgattgtcgtatggtgttctaattgattgcttgtttttgagaagcgactgatttcgttatcttcttggacaaaagacttcacaatccgcgtgcccattaaattttctttagcgaggttattaatcttatcgattaaattttggatggcaccgaagtgtttccccatcgaacccattgataagaatgtaatgatgaagaccgcgatcactaagagcacgataatccaccataaactcggaatcgaattcatcgcaaggatgaaactgccgacaaataaaatcgggattctaaaaatcgtttggagcgtcatcataatgacgttttgaacctgggtcatatcattggtcaaacgcacggataaattcccaactgagaatttttcaatattggcaaatgagaaagtctgtatcttccggaaagtagtttcccgcatatcggcagtcattccctgcgccgtcatcgccgacgtaatggtgttgaccacgcccgcaattaaaccaaccacggcaattacaatcaaataaattccaatttgacgtaccttatcttgatcgcctttcataatcccttccaaaacatcttgtaatagttttggttgccatagtgaagacgcaacagaaataaccgtcgctaaaatggaaagactaaacacgccccaataaggctttaagtgctgtttaagtatcgacatgagcatccctctttttctgtagttgaatctcctgtacaaatcttgtacagtataatcgaacagtgttcgagttactactttatcaaattttaaaacgaattacaatcatcttttcataaaaagtgaaggagcttcattaatatggtaaaacagtcaatctctgccgagcaaatcatcactgccgcgtttgaaattttacaagcatccgggaccgtcgatgccctttcaattcgtaaaattgccaatcaattagacatcggggcggccacattttactggcatttcgaaaacaaacaagccctcctacaggcgatggctgataacattattcaacaaattgagattgagccatgtaacacaaccttagaatggacagaccaaattcgccaaatttttagcgccatttacaccacttacatagcacagccctatgccgctgagttgatgatgcggaccgtccctgcaactaaggcccgcctaggtcttatcaaccacttaattcaaatccttttggatgccggtttcacgccagaacaagcaagcctagcgattgaatccatcgatcacttcatgtccggtctcttcactgacatcaccggtgagcttgagatgaaacatcgcgtctcacaacataaagacacttatcttgcacagttaccgcttaaaatgcagcagattgcgactgacaatcattacaatgctttcttaaaaacttttgaacatcatcggcaccaacaacaacgctcactggaaaaattcatgctaggcctcgatattttcctcgctggtttgcaacaacaacttgcttaaataaaaagcgcgcagacaactgattgtctgcgcgctttttacatttaaactgcttttgaacgaatcccgaatccataactcagagccatcacgccgacaatcatgatcatgtataacggtaatcgagtgttcgatcccgtatgcaatagactcatgccgtacgttaaggcgctgattgcgaggtagtagccaaaactaaacaacccgctggccgtgccgatcacatcttcgtaacccactaacgctaaattcaagaccaccggtaaggtcgtattcaatccccacaagaaaagaggccgtgggacgacctcttcttttgtgggtttctagctttaacgcgctttttgaaactgacttctgtgcttagctccaatccgtaaacaatcgactacgtcgctcatttacagatttaggctagtgctcgaagtcaaaccgtttcaaacgcgcttctatttctttaacgtgcttttaattcgcagacttctgcgcttagcaccgtgaatcaaatcatcgacttcgtcgctaattcgcttccccgtactaatactcaaaagttgattaagcttgaacgcacttttccccgattgaaatagcctacgctaactatttatgaaatgcaattaaaaagacttataaaaagtaaccatttttcaacactggcctgtgctatacttaatctaagttgatttcacagaaaggggcactttcagatggcccaaaaaaacattctccaatacttaattctcgggctgttaaatcagtctcccaaaaccggttatgatttaaaacgcgtctttgaagatgatatcggtgagttctggcaagcccaacacagccaaatctatcctgaactcaagcgactcgaacaggctgatcggatcacccacgtcgaattgatcgccggaacaaaattaaaaaagaagcagtattcaatcactgcagatgggattgccttttttgacgagtggcgatactccccaaccagcgaaattattgccagcaaagacgaatttattttgaagctatactttatcgactcaaaaaatgatgctcatttagacgcaatgttcaccgaacaaaaaaacttacaccaagccaaactagatcacctactcgaccggcgtcaaacccttttcagccaacaagctgcggtggatgcgcactatggtcattatcttattttagaacacgcgattaaccgcgaacaagactatcttaattggttaacaaccgcacggccgtaaaatcgacccttaacaaatttgagataagtgctatcctattagtaagaagtaaatcaagttaggctgtttcttcatttgtatacgttataataacgcgcttgtacaggtggtcagttgaccaattgtatgggcgctttttttgtttgatccagcaacctagactttaacaaattcaggaggaatattattttaaagcgcaagaatgttgataaagtcgtcttcatccccacgatgttactgttcgggattgtctccgcatttttaatgttggggggtgacacgcttcagcagtcgatttcacaactacttgatgtgatgacggcacattctaaatggctttacattggtatttatatcattaattttattttcctattttggttggggtgtagtcactatggccatatccgcctcggccaaccaaatgaaaagccagaatataacgacttccaatgggggagtatggtttttgcaactgggattgacgctagcatcttaatgcttagtaccactgatccactgcaatacttacagaacccaccatttggcgctaaacctttctcggctgaagcataccgctacgccaacgtctgtgggcaatttcactggggacccatggcatggatgatttttgccaccgcgactgtcgcaattggctacgctctctatgttaagaacttacgggtacaacgtttaagcgccgcaatcgacctattagaaggaccacaaccttacaaaaaaataattcgcaaattaatcgactttaccgttgttttcggcattatggggggcatcggctcatcaatcggaatggaaattcccgtgatttcaaaagtcttgagcacaatgaccggtttgaatgataccatctggcttaaacttgccctcttcattatcttactggtgctattcaccctcacggtatatgccggcttagataaaggcattaagaagctcagtgcttggcatatctatactgccattggctttttattactcgtcttactaatcggtccgacattcaagctaattggcgctgaaggccgcgatgtcttccatctctttggtaacttcgggcgtttaagtttaaatcagactggtgcacacagtgcgttcgcacaacacgaaaccctcttttactggggatggtggttatcttacatgcctgtcatgggcttattcatcgctcggatttcacgcggccgaaccattcgccaagttttattgggaatggcgacatacggcgcatttagttgtatgagcttttacgctgtacttggcggttatgcgctcttcttacaacgttccggtcaaatcgatcttgttcatctattgaatacccaaggacaagccgctgtcatcgcggcggtcatcacgaccttaccgttcaaaattatcatgttagcaattttctgtctgtcatgtttcattttcctggcgacaacgatctcttcttcggccttcatcgtctcatcatttaccagtcttgaattgaaaatcggagaacaacctaatcgttggaatcggatggcttgggtgatcattttcattctattttcacttggaattgtacttgtcggtagtttccaaaccattcaagccgtttgcgtgattgctgggttcccattgatttttgtctgcgcattattgctcgtttcgatttttcacgccgttcatgatggcgagattcccattgaaattgaaaaagaagaaacttctcattttctgaaaaaaaagcttacgccgaaattttttatgtgatacggttatatctgttaacttttcagaaagaaggaatttaaaatgccaaccaataaaaaagaaggtattatttttacaacattaatgtgtttctgcatggtacttggaatgagtatctataacttagttttacatgatagtctatcatggggtgctttgtctaccggtttaattccaggtttcatcgtcgcatttattctagatgtattcgttgtcggtgcaattgctaaaaaaatcgcatttagcttaccattgaacaaagaaaataaattagtcatgattctcacaatttcatgtttaatgattctcggcatggtcacatgtatgtcacttttcggaattctcatcgaaggtggtatccctgaccacttaggtagtgtctatcgtcacacatggttgatgaatgtcatcgtcgcattaccattacaactgatcatcgtgggacctttctcacgcgccattcttggtaaaatccaagcaaacgcagccgcaactgaaacagctgaataaaaacaaaaaaaaacgacgactagcttacgtagctagtcgtcgttttaattatgctaatattttttgaatagccgctaattcttcggccgtaaacgttaagttatctagtgcatgcacactgtcttgtaattgactcaagcgcgaagcaccaactaacacaatggctacagtcggctgttgtaaattccacgcaagcgccatttcagccaatgattgcacacgttgttgcgcaattttgttcaattcttgaaccgtactgattgtttgatcaaccttttcaggtgataggaagggactatctggacgagctgcccgcgaatcagctggaatcccgtttaaataacgattggtcaataatccctgtgccaacggactaaacgtaattgcaccgataccttcatccgccaagacatccgttagtccatcttcaatccatcgatcgagcatgttataacgtggttgatgaataataaagggtgtcccgagcgctctgaaaaccttcgtaatcgctttggtttgttctgccgaataattcgaaatcccaatatatagcgcctttccttgttgcaccaataaatctagggcccgagctgtttcttcaatcggcgtatctggatctggtcggtgatgatagaaaatatcgacgtaatctgactgaagtcgttttagtgactgatcacagctagcgataatattcttcttagagccccactcactatagggaccgggccacatataatagccagccttcgatgaaataatcatttcatcacgatagcgacgcagattatcatgtaaaatccgcccaaagttttcctcggcgctgcccgctggtggcccctaattattcgccaaatcgaaatgagtgatgcccatatcgaacgcgccaaaaatcgtttccttttgagtcgccatcttatcggtttcaccaaagttatgccataaccctaatgaaatcgctggtaatttcaacccagaatgtccgacgcggttatattgcatcccttgataacgggtttctaatgcgtgatacatgtacaacgccttctctactcaagtattttgactatttagccgatcgtcttaattgcgtcttccactaatccccagaacttctgatgatcgagttttacagcgactgatgtgtgacagtctgttggaattgggaatctaaaatcggcgaccgtcatcccacgcgtcaatgttccattgagttcgatatcaacgggcactttcttagtggtcatcacacttggatcaatcacgtaagccacggcacatggatcatgaacgggcggtgcatcgaaattttgccccttcttgtacatatcgcggaaaaaggctaacaaatcaaccacgaactgagacgtttcagtatgaatgccttcaatttgttcaacaatatctggtgtcgctaacgcttgatgcgtcaaatccaaaccaaccattgtgacatcccagccggcattgaatacaatcttggccgcttctggatcaaatttaatgttaaattcggccactgcactcgcattcgcttcgtgataaccgccacccattagaacgacttctttaacgcgttcaacaatcttaggttctttgcgtaccgccattgcgatgttggtcaacgcacctgttggcactaatgtaattgtattagctggatgcgtcataattaaatcaatgattaaatcaactgcatgacttttttcaagcgccaccgttggttctggaagaacaaccccgtcaaggccagtctccccatggatatcagctgctactttaatttcttcaattaatggtcgcgaacacccagcagcaatcggtacatcgtgcatgccgatcatggtcgcaactgcgagggcattgcgcgtcactttcgttaacgtctgattggcagccaccgttgtcactgccaacaaatcgatttctggattgccgtatgctaacatcattgcaacagcatcatcatggcctggatcacaatcaagaattattttctttgccattcgtaaaacctccactctctttcacttcgtgcatactatcactatagaatttaagcggtttcaagtcaaccatatataataaaattcaatcatgaaacggagtctattatgcgcattgatactggcgaataccctaccggcgaaaacgccgtccaccctaagaaagttaaacgtttaaaattacttagcaaggttgcaacaatcacctgtattacgatgtatgtttcatacatcccccaaattatcgctaatttttcagggtcacctgtctcacctttacagcccttagtcgcaacaattaatgggtgtctatggaccgcctatggctggaataaaacctataaagattggccggttattatttctaacatccctggcgttattttcggactcgttaccgtaataactgtttatattcactaaaattgtttgttaaagccacgatttgcgtcaaataatttttgataactaacagaaaagcaatccatcataagttgcttctctgttatttttttgtccctttacccaaacataaaaagccaaggtgattccttcttttatcgaaagaaaaccatcttggcttcactttgaagtaccgactatgggactagtcggccttaagcttgttattttgctgctcgtttaacgtatgtgccttcttgtgtgttgatttcaaggacttcgtcagcgctgatgaaatcagggacactaacgactaaaccagtttccatcgttgcaggtttacctgaaccagtcactgttgcgcctttaatcgaaggttgtgtttcaacgacccgtaagttaacagtagttggtaaagtaaccccgatcacttctgaaccgaagaattgaatcttgcagttcatgttttctaataagtattttaattcagcttcaatagcagctgtttgaatttcatattgttcgtaagtttcaagatccatgaagaatgccacgttatcttgtgtgtataagtattgaacatcttttgtatcaatcattgcttgttcaactttaacttctgggcgcattgttgtttcaacaattgagccagtccgtaagtcacgcaacttaacacgcataaccgtgtttcccttacccggtttatgatggttagcttctaaaactttgattaacttgccgtcttgttcaaacgtcattcctgctctgaggtttactgcttcaatcatgacttgatctcctttatttaaaaaaatattcatctctaactgtaccaaatgaaagccgtttaatccagccctcctgtggtagttatcctatttaatgtcgagtttatgaatcttatccgttggttgtggctcataatgttggtacatcttcgtaatggccaccttaggtaagcctgattcactaatataaatattaggtttgaggtatttcttattttgcacatcttttaagtgataatgttgaatcacttgtttctgatggccagtcggcgcttcatcttgaccatagaattgaatcttggctaatggtaagctaatcgttgcattattaatcttgaaataagcaacatctcgattgctgccaagatacgtcatcttttgttgcttatcagcttgatagaattgctcgatttgcttcatgctgtgattatcgaccagccggacaatcggttgatcacctttgaaaaggtgtaagccatctagcgactggcgcacgttttgagcactcaacatcaaccagacaatcaccaacatactgataaagtacacaatatgtaagctaagactgctagcagcatgattcaaactaaaagtgtagctatcctctagctctttattcatgatttggcgccgaatgcgcattgcaataatcttatacgataggtaccacactacaagcgcgactaaggttgccccaaaagccgtcaaaattgtattttttagaatttctgaatccgtcaataatggactaaagccgctcacaagtttaattgtgagcgcgccaaggattagaatcacaaccatttgtagtacaaaaaaacgggtccgaatacttttgctaatcttcgtgggtgttaccactttcgtcttatctcccataccataaatcctcccttgttaacctacttaccattttagcataccgtttccatcaagttgattaaaagtccctcgttggcttattttttacaaaggcatctttcttcaaagttagctgttcaatatgataagatgaagttaatcaaacggaggtgtcgatatgttatatccagaaagtttaactcaattactcgccgattcaaatcagccagtcatctcgttattcattaacttagagactggcggacaagccattaatgcgaacaagattaagctcaatagtttttctaagcaaatccgtgaacagttaaccaccgactatcctgaagaaaaaaccttactcaaccaacttgaggacttactaagtaccgctccccaagaattagcacatatacagtcagttgcgttttacatcacagctgctggtcactacagccaaccccttcattatccgatcacgactgaatattttctaattgctgatcaacccgacctgcgtccactcagttcggaattaagtctgagtctgaacgggaccattctctgtctcaacaagactacttttagtttgaaatccattcaacaaaatgtcattcgggattatcctttacctaaagacgccccaacaaccattgaaattgggattggcacagagcgtaaaggcgaagtcgtccaaggcttctcaagtccaacccacagttttgttgtaaaagaaaatgaacaacttatcgatcaaactaactatttccgcgtgattggccgctatcttgatgacttgctgcctgaaaaagcaccgatttacgtggtcacattacccggcaacttaaatctcttcaaggaactcgtcgttaatccaaactaccggatggatcaagccatccaaacttcccctgattctctttcagatgacgacttactcgacaagttactcacaaatgcgcgtcatgaactccgacaaaaagcgctcggattagcagaacgggccgctagtgcgtatcacggcgattcaaaccttggtgatcctgagattattctttcacgcattaacaatcgccaactaacagcactcattatcccaactgcacttgcaccatcagcaacaatcagcgccgatcaaatcatggatcttaatcacatgatgattgcggccatccaaaccggcctgccattctacccagtaccagttgaaaatattccgacaggactggtggcgatgggaatttaactcttaaaacacgtgccaatgcagcaacgtatattcaagcgttgttgtactggtccgtgttttttgagttgcaaatacttgatctagataagctgccagttggtccgttggtaattcttcgtaataggcctccaaaaatggcctgtcgaaaacttcacttgtttgatattgaaaaatttgttgactaacttggtagcccgcatcttttaacacgttttccacagctgggatgatttccggtgtagtgttgggatcttgctgttcaatcccaaaataacgttcaagcggtgtgaacaagtcgtcctcgtttttagtgagccgtaagaatgcacaccactgacggctcttttcgctaatcgtcagtaatgcttgattggcttcgattgccggatttaacgccatccaaattaaatcatagcttttttgtggcgtttgcgccataaagtcagccacagactgctgttgataagcaatctgttggtctggtacatgctgtttagcttcttgttgtgcatactggagcatttgcgccgagatgtcgataatcgtataagcctgactgttttgcactagaggtggcaaataacggccgctaccaccacctaagtcagccactgtctcaacaggcagtaatcgccgatcctgtaaaaaagccacaacgtcagtgacaatcgacacctgtgactcttgttgaatctgatagtattccgctgcaaaatcatcccaaaaagctgcgacttcattatccacaatctatcctccgcttaaacttttattttctcagcttagcatataaaaaagatgccgacaaaataaattatcgacatctttttgaaacgtgctttttggttgcaccaacctccgcttaatctaaaatactcagttgctatccgcgaccgaacacacgcttttttaaacgtgctgcaatcgccatattcttccgttgttaggctaatcctcagaatatctccggcgattttcgcactctttatctcactaccagcactgggattggtgcgtattttgccatgtaggcggcttggctgccgaagtatttagcaacgcccttttgtgatttcgaaccgacaattaacaaatcgggtttaaccttaggaatcacatcttcgataatcgcttcgcctggttcgccttctgcaattactgttcgcacatgattcacaccgcgcacataggcttgatcttgatattctcgtaggtggttttcaagatcctcatattggccgtggataaaatccttgttcaatgcttgatagacgttcatttcgtcattttccaataccgatacaatgactaattctaaatcctcacgtttagcccgctcaattgcataatcaaacgctaataacgcatcctctgagtcatcgaccccgactaaaattcgtttaatttctaaaactgacatgtgaccaacctccaattaattttcagttgctaattgctgttcaaaccgcttattgcctttatacaattcaataatcatccaaaccaataatgccatcacaccagcaatcaacacatatgcaatgcgatcagcagtagccaattgtgcagcacttgcgtgatcaccatagaaagcttcgatttgtcctggcaaccccatcatattcaaataggtcaagccaatgaccgataaccaacctaagcttttaatcaaccaactattcttgaagcgatcccccatctcaacccggctgtcggtaaacatcaacagtggcagcattgaaaatggtaaggcaaacgctaagaaaacttgggaattattcatcaaggtattgagcgcctcatgctcttccaaggctggtttattactggtcatcatgacgcagattaataccggaatcaccgataacaagcgggttaccaaacgccgcaaccacaatggcattctcaagtgaatgaacccttccatgatgacttggccagttaacgtcccggtaatcgttgaattttgcccagaagcgagcaatgcaacggcaaacaaagttgataagattccggtccgggcaacacttgcaagaattccgttactcattgttgaggtatctgacaaagcttcaaataacccgaagaatgatggatctttaaccgttcccgttttaaaaactgcaacccccatgattaataacaacgcattaacgaaaaatgccatcgtgagttgaatgtttgaatcccaagtggcaaagcgcactgtttgtgcaacctgtgcttcgttcttgcgatcaatcttccgtgtttgcgaaatcgcagagtgtaaatatagattatgtggcataacagttgccccgataatccctaacgcaccagtcaatggggttagtccaccaacagctggaccggtggcaaaggtcttagcagttggtactagcccaacaatcacccctgcccaatcaggatctgagagtgctacttcataagcaaaaaccacaaaaatcacgacaattaatgcgacaacgattgcttcaatcttacgaaaaccaattttcgttaagagtaataatagcatgacatctaaaatcgtaatgaatactgcaatcagcagtggaatcttaaataataagtacaaagcaattgccgccccaataacttcggcaatatcggttgccataatcgctaattctgtcaaaatccacaagacaatgcccaacggtttactcgtccgtgcgcgaattgcctgtgctaagtccatctgagttacaatgcctagtttagccgccatatattgtaataacatcgcgattaaactagacaccaaaatcacggacattaacaggtattgaaaactctgaccaccagtaatcgatgttgaccaattccctggatccatataacccactgccaccaatgcacccggtcctgaatacgctagtaacatcttccaaaagcctttgccctctggtacttcgaccgtcccattaatttcttcaagtgatgggccgttcgcatattcaatcagcttgtgcttcttgcccttttcttgttgattcattatcctcactccttattttgatcttgataacagttttattgtacgccgttttaatgaaatgtaaataaaaagttaggcaatgctaatttattttattcaaatcgataacaaatttattaatgcaagctacaaaaaaagcgccgtcgaaattattctcgacggcgctttacatactgctttaatcatccatttctttttcaagtagcgcgccagtttcagcgtctaatttaacttgcattttttgctgtttttgatgaccttctacttcccagactgttcggccatcatctttttccaatgaccatttgatcacgttcccggtgaagtattgttgcgctttttgaagagcttgttgaggcgtcaacaattggtcaaacgctaattgcttttggtgtcgctcgacgccattttgttcatcggcatcaagggcttctttcgacaatcgactggttacgccagttcgagcatccacatgcatgtgaagctcttcattgtcgttcattcccgttaattcataaaacatttggttaccccattgcttcagctcaacctcggttaaatctgatgcaggatattgttttgcgtacaattcacgggctttttcaagcgtcactttcggagcttgaaccgtttgttgcggactagtcgattctttttgagcggggggtgctgaatgttttgtttggttggctgtacaacccgtcaataggccgagcgttactaaactaacaatgattgttgttttgcgcatcctgttctacctcgctttgttttgatacttaaggataccattcaacagggtaaattaaaaagcaatatcccttcctagagcaatgttgtccccactttgaccaataaaccaagcccatacacgatgatgatgatggcactcactaagttgacgcccatcaagaattttggtgaaacttttttccggaaaaggctaaagataatggcgataccaaagaaccaggtcgcggttgccaaaacaacccccacgatgaatggaatcgcctcgctactcgtcatgccaccccgcaatgcgcccagcattaatgtcccatcaatcaaggcttgcggattaccccaaaccgccacaaatgcagtcaaaataaccttctccagtggcattggttctaacgcgccaaacgtaacggtactgcgggcactttttaaaatggtgtatccaatccataaaatcaaaagtccaccgattcccataatggctaaccgaaccgcatcgttttgcacaatcagtgcgccaatcccataaaacgccacgagtgaaaagagcgcatcaaataaccagatgaacaaactgttgaaaactgcccgccgtgttgtattcgacatggcattattaaaaacgaaaatattttgcatcccgattggtgcgacaaacgcaaatcccatcaagattccttttaaaaagaacatctattaacctccttggcaagttacctttcagcgtaacatatctaggctaaactttcttgtctggatttaattgtaaaatcagcatcgtcatcaacaagaataatgctgataaaatcaacgtccgttctcctaagaatgagacacatagtccgaccatcactgcaccaatcgtaaaactgataatgatgcgtaaaatttgccagcccttatcggctgccttacgatcatgtttaaaaacagcgtcataaaaactttccgccatcgtccgtacatttccagtcatcatcaatgatgtaaatgggccaccatccaattcacgaaattcctgtaattgcgcagccgcaatgattgaaacaagtgaacttgcaacaatatccggtacatacggtgaaattcccgcaacaatcgttaagaccaagacttcaatccccaagataatccgttgtcgtttgttaatcgattcgtctttttcaaaccgatgttgtaaaatgcgcgttaagattgttcccaacataaaggcgagaatcggggtaatgtgccgtaataatacggaccatttcatctgccccaaatgggttcctaataaaattagattccccgtttgtaatccggcgaagacttccccgtgcaccaaataagtgtaagaatcaaagccccccgcagctgccagtagcccgccatataataatttgtcgctcattgtcattttgttccgcattaattcatcctactcctcaactaaactataagtattaactctatcggaaaaaccactcgccgtctacaagtagttatcatttaaaacgttatcaaaaaaaggcctcagcaaactgattttgctaaggcctttttggcttaattttctacgtcaccattgaaaccagctaattgacttgaataaattgataaacgcgtcgcataactaggatggtcattattttccttgaccacttctttaagcgtcgataattgatcggtaataatgccgtcaacgcttgtaaataacatgcgttgcatcacatcctcatcattcaccgtccaagcatatactgtctgccctttgccgtgtgcttgacccacaaaatctgagtcgagcgtcgtcgcttccatcgtatagccattagccggcgtttgggggaatgtaatgttatacggcagaataaaactaacaaatagttggggtgctttttgtttaatttccgccacaatcagataacttaatgaatgaatccggttatgattcttcaaaagtcgtttttcgtatttatcgataaagtgttgcaccatctgtggactgtcttcattcgttgtcttaatttcaacgagtagtttttgatggtgcttttcggctgctgctagatattgatcaaaactagcaacctttgcagaatgaccattttcacggacagtcaatgccgttaattcagcaagtgtcatgtcatggacgccgcgatcgacacccgccaagtgttttaaattatcgtcatgcatcacgacaaattgttgatccttggtttcatgcacatccatttcaacataatctggctcttcctgcgccgttttttcaagtgctggaatcgtattttgcacaccattaccatcatctaccccgcgatgcgaaatcaaggccggttgatcgtccaacattccctctaaatagacataattgtacaatgctaccccaccagccacgataacaattaaaccgattgtgccaatttggcggagaatcgtcaaattagtccgttttttcaccttagattggcgcacaaccgtcgccattgcgggaacttcaccatattggttcaatacaatctgtaagactagtaccaccgttaatgcgagtaaaatctgactgacgatttctaaaataaacagattcaaaatggctaaaaataaagcctggtgtggcaagtgttggtcgtaataccgttgactagcaaacaagattaagcggaagcccactccaacaattgctaccgacgttgttaatacaaagccttttagaaaaatacgccaagcctgatattgggtagcttgccaacagcgtttgagcgtggttcttagctgcgcctttggatgtgcaatcgtttctggtaaaaacgtgattaagcgaattgaaaggactaatgcactcgcgtagaccaagataatggggacccaaattttgggtgatgaccacatatcctgaataataaaatctggaacggtcaccttggataacaacgctgatttaaagaggacctgtccaaagggtaagattaataagaaatacagtaaaccaaccaacatcgtggttggccgtaaagcgactaatccccggactgtttccttaaaaatcatccagtatgtttcttgtgtttgcttttgaatatggcgcatactgcgcaacaagaacgtcatttgcagataaactgccgcgcaaatcaagaccagaatgattagtaagctaatcagtaaaagcggatgacgcatcatcaccggcaccagattggtgtaggttaaatacgtcacgccattgagtgccaccaaccgttctacaagccacgtaaacagcggtgccaccaagctgccaataattaaattcgtaatgacgagcagtaataaataaacactccaatgttgtctaaagagccgataattagcccttaaaaatgatgttaaacggcgcatataagttcctcccgaattgttacgttaaaattggtaataatgaaatcatcagataaatcatgctactaatgagaacaatcgcgacacttgtccaaaaattacggtgcttttgaaaatgatataaggccaataaactgccccaatcgagcagttcttgacttggaaccgcaagccacgataacgtgccaaatattaaaaaactgacaacgactgccgttaacaagcgcaagaaccaaccggatacccgtagactttgtaagattgtattcacaagctgaccagtcgtaataatcaccatcatgtacaaactaatgaataatatctgacaacaaaagaaccatgctaatgtcggccagacctggttctgataaatcaaggctgcgtaatcatttattagaccgacttcaagtgatttaagcagtacctgatacattaaaagggctccaacgattggaatgccacaaaggagtacaattgcaccgatagccccacgaatattgcgccaactaggaagcccaaatgaaccttcttgtgccagccataaaccatcaaaacgcgtcaaccaccatcctagcgcaatgactaacaccaagtaataagcaaagcttagaagacgtaaccaccacggttgtgcggctaactgcgcaaagtctaggttaaataattgcaacagtggttgattcgtattcaaaagcgttaacacaaagatcaaactcgcaaggattaatccccatgtgcgcttactgagcttttgcatcatcattttgctttgcctcctttaccagagtatcaatatcaaacgatacaacccgaccaatccgcgttttagcatttaatgcataggctttggcaccagattcaaaaatcgcatataaccgattgccatccaacgtaatctgctctaaatgagctggcatccgaatcttaagtagcgccttttctggcgtaaattgttggggccgcccagtcgttgcaaaaacgtaaatccatgaatcgtctaacccgtaggactgcgaaaaataagcccgcgtatcactaaaagttagcccttgaatcttatccactgcttgccaacgttgttcacttttaagttcattactgcggatattccgcgccgtcaatttaacaccagctttttcgcgtcctttaatgaccgctgaaacctgaaacgactggacgttactatccccgaaaatattgaaatagccgacccataatgccccatcgtgatagctaacaagtgaagcccgggtgatcgacttcaacaacgttgaatattggtattgaatcggcttttgcggctgatctgcagggtactggcgaatagttgttaacttaattgcaaatagctgtgcacgtgccttcttacggccacaaacccataagagatcatgttcaggatcataagtaattccaccaacgtgtggtcggccctttaaaataatattcttcaaatgtcggccagtccgcttatccataatggacagaattgagttgccttgccgttgatggtcataagccgaaacgatcacatagtccggcgtaactgttcccccttgaggtgtcatcatttctgctgtatatgctttgtaacctgccggcgtttttttcaacatctgcgcctggtctaaatctggcaccaagtaagttccagattgggttgcctttgcatactgtccaaaagaagccggcgttaacccttgatagtaacccaaatcccgttttagatgagggagtgtaaatcgcgcataaattacctgtctagattgcgtgattgcctgttcagtaaccgtcttagcaggaccgaaaataagccacaaagcagctgataacaaaagcaagcagccagttaataaaaaggttgttcgtttttccaaatgcatcatcttactccttatccgcaacaaaattagatacttgttgattccctcagtataccaaactctgaatttaatgtacccctttaacgaatgaacgaacaaaactattagatgcacacaaaaaaagcataaccaactaagtggttatgccttttttgtgatggctaatactttaactttccatttatctctagaatttcatcaatatggtttgcgtaccaatcttcatatgcctgaccgacaagtgctaatacctctctccctttgtcggtaaccgccaatgatacccgtcgctgatcatctggtgtcccaaattctttggttatcaaacctttccgataaagagtgttgatcttgcgtgacgttttaggagcgccaccaccaatttccttagcgagttgtcctggcgtaatcgcttgcttttcttcgattaactttaagattaaatggctgtcaaaactaacaccatattcttcaccaatttgattgagtttaaattgaatcgttttgattgcattgacccaatcaacaaatctgttaaatctttctttgctttatcttcagtcattttatattctcctactaaactctgttgccatcatttgtaaaaccaacatttactaataataaattagcttataattaagcaatattataattattattatctagctcatcgcgctattatcttttgtgcaagtcattatagtcttaatttcataaaaagtaaatattttttaaaaacttctacgacaatcaagattttcggcagtgattcatttacaatttaccaaaatccacatcaataaatacctttttatgactagagttactcagatgacctcctagatttgatttatattttgtttataaaattgattttatttcataaaaaaaggcccgcatctaggatgcgggccttcaatcattaatgtctaattatggatataagtaaatgccccggcatttgaaattgtttgggtgttaggaccagcagggttgctgaagcccatcccaccttgagtgatggtaattgtcccagctgcggcatcgtatgattgaacgtaagcaacgtgaccatatgtcccatctgcggcccaagaacctaccatttggccaccagcaaagctaacgattgcgcctgctgctggtatatggttaactgtgaagccagctgctgcggctgaagcaccccattgagcgccattcccccagttattgccagcccaaggtgctactgacttaacataccatgtacattgaccccatgcatatgaattcccagctgaattaccagcaacttttccgctgccaccgaaaacagatgtgccacccttattatctgatggcgtgtcaattgatgtaggttgaggtgtgtcttttttagcattgttggcatcgtctgcagcctttttagcagcagcgtctgcttcttcagtacttgctttgtcgaagtctgcttgtaaagctgttaattcgtctttgttatcattgattttttgtgataaagctgtttgtttttgatcagcttcactcttcaatgattctaagtttgctttttgtttttctaaatcagtcttagtagcaactaaacttgctttagtattttcttgttctgtcttcaagccgcttaattttgccttagcgctgttaacatcatctaaagcttctttacttgcttggtttaatttattaattgtgaatgaacgcgaaactaaatctgaaaggtcatttgagtttaaaaggaagtcaacatatacgttcccgctgacagcatccccactcttttcttgtaaggtcactaattgtttcttcaatacgactgttcgtttagaaacttctttttgagcatccgtaatttgacctgaaagagattcgatttgattatttgctttagtaattgctgcttcttgatcagcaatttttgaagcgtttgttgaaatcttttgatccaacccaatcacttctgtattagctgattcgatttgtttgagcaaatcgtttgttgcgttcttattagcagtaatcgcttcttgtgcttcacttgaagttgcagcagatactacgtttgttgaaagaactgaagctgttaataatccaagagcaattgtagtcgtaatcgtttttttaaatgacatggtttattttctcctattagttaagcccgaactctgagactaagtatatagggcgaatgttacattaacattacataaacattatgcttacttaacaaatcataaaatataggctttgtaagcgccttttacgactttagaagccgatttcagagaacccttccttattatttctttatcatctttttattagtcatttataaaagtcacttcttcatgctgcgtccaactatccaagcgcgcacttttcagttcaattgcgtagataatttcccgttcacgatcttctgctgataaactatccataaacccagggacttgggcgttgtaataatcagctaattcatctaacttgtactgcgcgcgataaacacgcaaccggctgctagcaatcgtcattccttcgctagttggcattgtgtgaattgccgctaaaccacgatcgagttcttcaatcttaggggtatccggtgctgtcccaaaataccaaatattcggtgcatcatccaacacgataaaccgcatttggcggcttgaaggttgcccattttcatccgaagtactgagcatcatttcatttgtttgattaacgaacttctgaaatttgcgcaaatcattttgatgaatatgcggattagcgttttgtttatcaatatacgcgattacttcatcgatcgatgtaaactgtggttttgtatgtaaaaaatacaaaatctgtggaatcattcgcgaaatttcccgcttgtgataataaaattgtaaccaccgcttagacgccaacaatgcccctgcatactggacacgcaagcggttattatagtgtttgataaacaattgcattggattatagcgcaccaatttctgccaaatataaaaattgaagaatagtaaaatcacggtcatcaaaacattcacttgaataatattgatgacggataaattaccgtatcgtgcaaaagaagtgtataacacccaaaaaccagccgttgttaaaatagcagcgtacatcactaaacgttgcttaaacaaccgtcgcttatgcataataaccccaatcacgcgttggcggtttttcatatttcgctcacgaacaatcatgtcatcgacaattgcttgatcttttttagaaagcatcttcttcctcctcaaaataatcaaatctttgccgtaattcataggtgcccacatccgcgtaatctggaatgataatctgtggttgttcgtgccgcatgtctaatggaccatacttttgtaagtacatatcctctgctagatcgatgcgctgtctcaatcgcgtcggatcatacatccgcagcaaaccttttttcaaacgatattttcgtaatttattcaatagaaaaagccctaaaaagaagactgcaaatacggcaacgtataataaaaagtaataattagtctgtaataatatccttctaaaggccattaagtcaactggtagcggaacacttttgacagtatataagacccccgtaatggtcatcggtaccagacacattaaccatccaatggcaatcagaatcccctgccagatttttttgcccgtctttttcttagtaaaaaaccaatcattcgtcaacgatgcttcactcacttgatgcgtgatatagtctggtttagtcatcttgattgccctcctcttttgtcttagcgacgacctctaccgaacgttttggtgacttccaaacgccagcatcctcgcctttaagaatctgaataatcgttggtccgatttcaaccgccacggtgaaagtattcaccatccaatagattaggatataccatggcgcaaacgcaatatactttaatgatcgtccacggtcattaaagtaagacgccataatcaactgaattaagcccaccacaatctcaattgaaataaaaatcgctgcaaagcataaattggtaattagacgtgaccaatccccttggaccaagcacaacacctgaacaccaacaaacgcaatcatacttaaccagaaaaatagcgaccaaataacacttaaactgtaatcaacaataatgggtaccattgccaaatgttcaatcgggtgtctaaagacatccatcgatttcgttaacaacacatgaatcccaccggcagtccaccgtctccgttgtttgaccaactcaggcagtgtttcaggcacatccataaaaaagcgaatatgtggtgcgaaatacgcttgccaaccatgcacctgcatatcccaagaaatagcgatatcctcagttggttgttccgcttgccaacccccaacatctaagaccgccgccttacgatacatggtattagcaccagaaaatgcaaatagaccaccgtatgaaagctgcgaacgtttaatcagtccgatgatcgagttcaattcattttgttgtgcttcagctaccaacgatgttttgttgattaataacatattgccagtaatggcccctaatcgatcgccaccttctcgttcgaaatagtgcatgtatttccacaatgcatccacttccggcttagaatcggcatcgttcgataataaaaattggccttttgaaaatccgagtgcaatattaaacccagcggctttcccacgattattaatgatcgtaatcacacgtaagcgcttctcaccataccgagtctgcaaccgattcaaaatagcacctgtttgatcggttgaaccatcgttgaccacaatcacttcatactgattggttggataattcattcactcttcaaggtgttcaattgtcgattcaatcgaagcttcttcattatgcgcaggcactaaaatagtaatgaatggcgtccctttttctaagtaacgtggcatatctttgcgttctaaaaataaccagtaataaagactggaaacaatgaaagataatcccccgacgattggatacgacacaattgtgtagatgagtatccttgttatgtaatctgaaaaagccatgtagtcttcacccagtccttattgttgttcgattttaatagacgccaacttcatcacggacaatcaattgctctgcaaccaatacaataacacatcaggttcacattattaaatatatttatttgaaattttatcaattttaaaatgaaagcgtatattccacatcgagaattaattatattcttatttttggcgtacttaacgaatcgaaactttattttttgttgtaaatgcaacaaaaatattttatactatttttatcgaaatgaggtatgccatcatgactgaaattctccgcccaatcggggttatagcccgcgcgttggaatccattgctaatattgaattccaacaatatgatttaacccgcgggcaatacctttacttagtccgcattacagaacagcctgggatcattcaagaacgtctaggtgaattattaaaagtcgaccgcgcaacagtcacgcgcgccgttcaacaattaattaagcatggtttagttgaacgataccctgacaaaaccaatcataagatcaaacatctctatctcaccgaggccggtcgagccgtctatcccgccatcaaagctgaaaacgattattcaaatcaaatggcactgactggactgacgaccgacgagtcccataatcttgaagcactcctaaacaaagttagtgccaacgttgccgcaaactgggattttgtcaaaaagggacacgtccgacactattacaacaaaggaggcatcacaatgccaattcaagctgtcacattaaaccaactacctgacttacaatccatcagccgtgaaactttcacagcaacttttggcgctgaaaatgcagcagaagatctcgctaactacttagaagaagcttataatacagaccgattaactagcgagctcgagaatcccgattcgttcttctattttatttatcaagatggcgaagtcgctggttatttaaagctcaacattgatggcgcacaaactgaaaaagctgccccggattcactggagattgaacgtatctatattcgacagtcctttaagcgacttggtttgggaacacaactaattaaccatgcactagccgtggcgcaacaattccataaaactaacgtatggctcggcgtgtgggaacacaacactgctgcacttaacttttacaagaacctcggcttcagccaagttggtgatcacatcttccaactcggaagcgacgcacaacgtgatctgattatgcaaaaaacattaaccgtttaaacacacaaaaagaggcaacctatcaggttgcctcttttttcgattattgatgcgcacgttcatattctgtatcacagtcagctgtaaaaatggattctgttccggcttcaagtgcctttgtgtaataccattctttatgatctagcttcgtcaattctgcttgcagtgattcaatctcgttagccaacatttgccgccgttgttgaatcaacgccaagcgttggtccaaagtttcatcacctgcagttcgccaatcgatgtattgcttaatatcttttaactgcatacccctttttttcaaacattcaatatcacataaacagtctaaatcagcttgccggaattcacgccgaccagccggactgcgtttaataaacggtaataatccttgttcttcataataccgtagtgtcggaatactcaaatcatattgttgggcgactacgccaattgataatgccatattaaccttccttatacttgcttaaaaatcaacgtcatctggcaccatgcattgaccgcctaagttttccaaagcactaattcgggtcatttcactatctgttaattcaaaatcgaagatatcggtattttgcgccattcgttcttgatgagttgatttaggtaatggtaacacaccttgttgaatccccccaacgaaggcaaacttgcgctgtcgttttgccgtgcttcgtcgcaattgttgcaatcgtttcattcgaaagcgcactggcttcaccaagtggtgcccaagcttcgactaagatgtcatgcgcttgattataacgcacagcttctgcttgtggccagcccggatggacttcgatttgatcaaccattggtttgataacggcggttttcatgagtgcatctaaatgatggggcataaagttcgacacaccaattgcacggatcttcccttcgttatatagatcttccattgcacgccaagtttcagcatttaattcagcatctttggcttcaaattgtttagtgttagctggccaatgaattaaatataaatctaaatagtcaacacctaacgttgcaattgtttgtgcaaaggcagctttcgtagcatcatagccccgttctgtattccatagcttacttgtcacaaagatgtcttcacgcgcgatatcactttttttcaaagcggcaccaacaccttgttcgttgccgtaaacggcagctgtatcaatatgccgatagccaactgataaagcttctaagaccgcttttttcgtttcttcatttggtgtttgatatgtcccataccctaatcctggaatggtaacaccgttgcttaaggtcattggggctgttaaggcagataatttttgcatttaaaagtctcctttttctaatcaataagactactttacaacctcaagctgacttgaggtcaaccattatttgggggcctatcactttttttaaatccgttagtgcttccctaggaattatgcctgactaataagagccttaaactaaacttaactattctgatttttagcggcctaatcccatcaataatcgtatcatgaccactgacaattcctatgtaagggttttatcttcctattttaggaattcgcggtataatatagatatcaaaagtagttaatggaaggaagcgagaaacatgaaaaaatttctattaggcagccttatttttgtaggtgttacagcaaccggtgcttgtttattagctaagaaaatggaactttttagagacgattctgtggattacgaaaaattcgaaagccgttagtcactcgtcatttctaaactgaatctaggaggtttttcatatgattaagaaaaaagcaattatgattggcgctggcctttctaacatggccgcagcagtctatttaattcaagaaggcggttggtctggcgatgcgattacattctattcattagatgaccatggttcaaacgatggggcatcagtttccgaaacaaccgatgaatattggaataaaaaccatcctctcgaaaatactaagggctacgttgcacgtggtgggcggatgcttaactatcggacttatgtcgatttaatggatcttctaggtcggattccttcagcaactgaacccaatatgacggctgaagaagatacccgttcattcgatgctcaacaccgcacattcgacaaagcacgtttattagaaggtagtaaaggtattttggatgctggtcatctcggctttaataataaggatcggttattaatgaccaaattgattatgatgcccgattctgaagaagaaaaattagacaacgtttcaattgccgaatacttcaaggacgatccacatatgttccaaacaaacttctggtacatgtgggaaaccacctttgctttcagaacccaaagttccgcacaagaattacgccgttacatgcaccaaatgatttatgaattcactcaaattgaacacttagtcggtgttaaccggacacgttacaatcagtacgaaagtatcatgctgccgctgattaactacttaaaagcgcaaggttgtcacattatcctcaatcgacggattactgacttagactttaaagagactcagatgaccgatgaaattacggttactggtatgacaatgactaatactgagacagatgaagttgaacacgttacggtggacgacgacacagcggtcatcttcacaaacgggtcaattaccgattccgcaacacttggcgattataatacaccagcagctgaaaacatggattatggtgctgctgccggtctgtggaaacaagtcgcttctaaattctataatcttggcaatcccgataaattcttcgctgaccgcaatgctagtgagtgggtcagcttcactttaacgactaagaatcatattttgttaaacgaaatcgaacggattacaacgcaaattcctgggaatgctttgaattcgttcctatcaacgaaaccaatcacaccacttggtcaaaaagatgtgaatatgtcgattgttgttcaccatcaaccacacttcacaacgcaaaaaccaaacgaagcggttatctggggttacttcctctacccacgtcgtaacggtgaatttgtggataaaccttacatcgaaatgacgggtaaggaaatgcttcaagaattaattggccaactatcaaaagttgatcctggcccaatcaatattcgtgaaaaagaagctgaaattatggacagtgtcatcaataacattcctgtctatatgccatatgcttcagcactctttaataatcgtgccaaaactgaccgtccagaagtcatccccgaacattcaaccaacttagccttcactggtgaattcgttgaacaaccttatcagatgattttcactgaacaaagtgctgttcgttctggcgaaattgcagcttatcacttcgctggcattccaatggccaagttagtcgatacaccacgttatgatcgtgacatcaagacattgatgcgcgcaactaagaaaatgtttgcttaatccaaaaaagcgcggtagatttttacaaatctaccgcgctttttttctttaattgtaattcattttcttctctaagacgttctaactctgtttgttgccgttttcttgattgtttatcagctgacataattgtttgccgtcctttggaactaaggcatcagcaccctcagtctcccaaatatgttgccattgccagatggtcccgacgtttgagatattaaaatgaagtgcggttttcggataagaaaccttattcgttttcatccattttaaaacattcatcttaaatgagccatcaaatgttttttcgggtgataggacatctagtccttttgggccaaaggccttataacgttgaacccacgagacaactagtgagttactcttaataccatattttctcgctattaattcataacctaaggatgacgttagataatcctgaacaacttttatttttaatgttttagaatatttggtcaatataaaaacccccgatattggattttggtccaatatcgggggttcacttcagagacagattttgtcttagcctctttttttgtgttacttttcaggaagaactcgcctaccagctctccgtcttaagtctgatttataagcgaattacttgaaagtttgacctattttgactattatagaattagtcagaataatctgacacttaatttaaaaaataactgaaaaaggaatgacgtctatgaatccagaacaaatgacacaagctgtccaagatgcacttgcagaagcgcagaaaatcgcgatgacgcgtcatcaaactgaaattgatattccacacctctttaaatatttagtccaaccacaacaactaggacggcaaatttaccaagaagccggtgcagatatcgatgctcttgaggcggagattgatcgtgaaattgacgcaattccaacggttgaaggtcaaacgaattacggtcaaaacatctcacaaaacttgtaccaagtattaactgctgctgaaaaatacaaaacagaattccaagatgaatttttatcaactgagacggtcatcttgggcttaatgggtttgaaataccaggcacttgttcaatatttacagaaacaaaatgtcactgaacaaaaattaaagaaagtcattactgatttacgaggaggcgagcgtgtgacatctaaaaaccaagaagataattaccaagcgcttgaaaaatacggaacggatttaatcaaagcggtccgttctggcaaaatggatccagttattggccgggacgaagaaattcgagatgttattcggattttgtcacggaaaaccaagaataaccccgttttaattggggaacctggtgtcgggaaaacggcgattgttgaaggattagcgcaacgaatcgtccgtaaagatgtgcccgataatttaaaagataagacaattatttcactggatatggggactttaatcgccggggccaaataccggggtgaatttgaagaacgacttaaagctgtgttaaaggaagttaagaagagtgaaggtcggattctggtcttcattgatgaaattcacacgattgttggtgctggtaagactgaaggtagcatggatgctgggaacctcttgaaaccaatgttagcgcgtggtgaattacacatgattggtgcgacaacgttggatgaataccggcaaaatatcgaaaaagataaggcgcttgaacggcgtttccaaaaagtgctagttcaagaaccatccgttgaagataccatcagtattttacgtggtttgaaggaacggtttgaaattttccacggtgtccggattcacgataatgccttagtcgcagctgcgacgttgtcaaatcgctacattacggatcgattcttaccggataaggcaatcgacttagtagatgaagccagtgccaacattaacgtcgaaatgaattcacaaccaacggaattggatcaagcaacgcggcaattaatgcaacttgaaattgaagaagaagcgttaaagaaagaaaccgacgccgcttcgcaaaaacgattggctgagacgcaaaaacaattagctgatttacgcgaaacaacgaataatttaaagatgcggtgggaaactgaaaaagaagatttgaaccgcattaatgataaaaaagcggaaattgatgctgctaaacggcaattagaagaagcacagggaaattatgatttagaaacggctgctaagttgcaacacggcacaattccacaattagaagaagaccttgccgaccttgaaaaggctgaaaagccagaggactggatggttcaggaatccgttactgaaaatgaaattgcaacggtggttagttcccaaactgggattccagtcgccaaattagttgccggtgatcgacaaaaattactgcgtcttgccgatgttctgcatgaacgggtaattggtcaagatcaagctgtcaatgctgtgacagatgctgtattacgttcacgggctggcttacaaaatccagaccgtccgcttggctcattcctcttcttaggaccaacaggggttgggaagaccgaattagcaaaagctttagctgaggatttatttgattctgaacggcatatggtccgcattgatatgagtgaatatatggaaaaatattctgtatcacgattggtcggtgccgcaccgggctatgttggctatgaagaaggtggccaattaactgaagcagttcggcggaatccatacacaattgtgttattggatgaaattgaaaaagcccatccagatgtctttaacattttattacaagtgttggatgacggtcgtttgacagattcacaaggacggacggttgactttaagaatacaatcatcattatgacttctaacttgggttctgaaatcttactggacggtgtagatgaagaaggtcaagtttcacaaacggctaaggaaagtgttcaagccttaattcagacgaaattcaagccagaattcttgaatcgaattgatgatacaattatgtttacaccattgagcttgaacgatattcaagcgattgtggtcaaaatgcttcatgatctatcagaccgtttgtcagatcaagaattgacattgacgatttcagatgctgctaaacaatgggtggcagaagaaggttacgatcctgcatttggggcgcggccattacggcgttttattacgaaccatatcgaaaccccattggctaaagaaattattgccgggcatatgttaccaggaaccacggttgaaattaacttaaaagataaccagttagtttttgaaaatcgctaacgattgaaaaagcgctgcaaatttaatttgcggcgctttttttggacatcaatcagggattattactgtcagattgatgtttgtatggtacacttattagggatgatgtacagaatgttagtgacgattaaggacgattccactttgaaagtggtgtcattaagagtcgttaatcaattgtttttctgtaattgacttgctcttagcggataaacatagtattatagaagtcgcggacaaaagtagcgggacacgtgatgatttaaaatcaatttgaatgggattgagataatccttgccaaattccccgagttcggtatatcattaatgaatctaagatataaaggagtctgaaaataatggcagttccagcaagaagaacatcaaagacgaagaaacgtatgcgtcgtggacatatcaaattgaacacaccaaacgtacaattcgatgcaactaatggcgaataccgtgtaagtcaccgtgtatcaccaaaaggtttctataaaggcgaacaagttgttacaccaaaagctaacgactaatcgtcatcgagagtttctgaataagaaactctttttttatgcagtttcctagttttaaatactagatggtggtataatgagtattgaataaaaggagattgataattatgaaaaatgaacacttgaaacaaaagctcgatcgtctacaaattgtacgcttaccacgttggacagacctgcccgatttggaactatatatggatcaagtggttagttacatcaatcaatacctaaacgcgttaaatttagatgaaatcaccgcttcaatgattaataattacgtcaaaaaagaaattgtggcagcaccgattaaaaaacggtatacaaaatcgcaaattgctcaagttttaattattgcactattgaaaacgagtttttcgattgaagaaatcaaacaattgatgacagcggaaacacctaaccgaaatgaaaagcaactttatgattactttatcttaacgtttttagcagcgattcatcagttagatgaggattacagcccctatgaccaaggcaaaaatccagcaggtacattggtcactgaaacccaacaaacattgctgaaattagcatgtcagagtgtggtatataagattgcaattgggattactttgaagaaagaaccagttgaagaaaaaacgccagcaaaaaataagtaattgactagaaaatgagaattgaattaagattcacaaataattcaattacaaaaataatgaattcgtttacctctttctattttcgccgtaaaataaaggtaactaattagtttattaacaaatgttagttaactaatttttattcagaggattaatcattgtggttaagtctgaaaaaaatgaaagaggtgttttaggtggcagaaaagaagaagacgaataagttaacgcttggtgcgcttattctaatggtctttacgtcagtctttggatttacgaatatcccacgtgcgttctacttgatgggatatgcatcaattttttggtatgttttagcagctgttaccttctttattccttatgcatttatgctcggagaaatgggagcggcctttggtgaagcaaagggggggatttactcttggatggagaaatccgttaacgctaaatttgcctttgtcggcacatttatgtggtttgcttcatacattatctggatggttaacgtcgggaacgggatttggattccattatcaaacgcctttttcggggttgataaaacacaagaatggtcaatctttggtttgacaaatggtgtgcaaacattaggaattttagctattatttggatcattgtcattacctttgtcacatcaaaaggccttgataaaatcaagagaatcaccagtattggtggttcagccattacgttaatcaacgtgattttattcttgggtggtttgttaatccttgttttaaataaaggggtaatggcacaacctgttacaacccatgcattcttccaatcaccaaatcaaagctatacatcgatgattcaagtcttcagtttcgttgtatttgcgatcttcgcttatggtggtcttgaagttgttggtggattagtagatgaaactgaaaacgctaaggttaactttccaaaagggttagctatttctgctgtcgtgattgttgtcggctatgctgttgggatctttatgatggggactttcactaactggaacttcgtctttaccaatggtggtggcttcgccaaagcaaccggttcaaacgcaaccgttactttggggaacgttgcttatattgccatgaacaacatgggttaccaattagggttagcaatgcacttaagtgaacatgctgctattcaagttgggatttggctcagtcgttacatggggctttcaatgttcttagcacttagtggtgctttctttacaattattttctcaccattaaaaacaattatcgaagggacacctgctgccttttggcctaagtcatttactaagaaaaatagtaataatatgccggtcaatgcaatgaagatccaagctgcaattgtaattgtgattattgccttcgttgcttttggtggtaagagtgctgctaagttcttcgatatcttaacagcgatgacaaacgtttcaatgacattgccatacatgtttgtggcatactcatactttggctttaaaaaggatgaaagtatcgaaaaaccatttacaatttataaagggaagaccttctataaattctgtgtctgcatggtcatgttcacagttggttttgcgaacgtctttacgattattcaaccagcaattgatggtaatttaagtcaaacaatctggtcagttgctggccctatcttcttcacaattgttgcattatatatgtttaaccgttatgaaaagaaaacaaatttaaaataagtttttaaaagagcggccgttaagtggtcgctctttttgattggtcttaaaaaatgtgacacttcgtcgttttcgcttgaattgtgattctaaaagggttaagctaagatttcaatgagttaaatttcaatgaaaaggtgacgaatatgaaaaaaacaattgttggtttagtgaccagcttagggctaatcggtctattggctggttgtgggacaaccaaattaacaacgactaaaacaaattatcgccaaaatggaatggtggcagtcgtaaaaggttcaacaaccaaaaaagctgatttacaataccggattaatcataatcatttccaaaaagcaacggtcaaagacggaacttatgtgattcaagtaccaacaacgactaacaaacaaacagtaacggtacaagctaaagcaaacggtaaaaccgttcaaaagaaggtaacgattgcagcgggcacatcagttggccaatatgccaagattgccgcgcaatacaaccaggctttaattgggatggcgttatctaaggcagatcaaaccaaagcgcaggaattgcaaaaacaagcagcagctgccaaagcaggccaacttgcacctgctgatctgatgacacttaagcagcggcaacaggaagtacaagcagcaatgcaacaggtgcaacagacacaaaaggatcaattgctaccaaccacacctaaaaatggggtgactgaatgggtcgcaacaaagcatgtcaccattcgcggttctgttgatagtcaagatgtaatggggatgacgctcattacacccgttaaagcgctcaaagataaagcggcattgaaagattttgggaccagttttgcattgattgcgcaagcaacgggcgctgattccaaaaaagtgatgtccgaatttagcgattatacgaagaaaaacaaaaaaggtagtcaaaccacgatgaagacgattgaatcaaatggtgtgaagttcaataccggtttttcaacaagtaatttgtatatttacattacaaaataaacgtaaaaagggccgcaactttatgttgcggcccttttttgtgctttatttagctggatcttttggtaagacaagaggtaagaagttgagcaaaagcccaaaaataactgagacgataacagttgtttgaatgttaaagccggttttcgttagtttagaaccgataaatccaatgacaaacccaaaaatcaatgtccaaagtagattcataacgtatttcatagttggccttctttctttgattcaattctatgatattgtaacacgttttccaaagagaatcatttgaaataatttgttatactaagagtaatcgaattaacgaagaaagaaggggcgttgcttgccattcgttcaactacaggttaagagtacctatacgctcttggaaagtaccactaaaattgatgcactgattgaaagtgctaaggcgcgcggctatcagagtattgcgctgacggataagaacgtgatttatgggctagtcgatttttataaggcggccaaggcagctgacttacatccaatcttgggtttaacgcttgaaattggcggattacttcaaaccgatgaacggtttccgctaattgtattggcgaaagatttagttggctatcagaatcttttgaagctttcttctaaagtgatgactcaaactgatctggtttcatttgctgatattacacagtggttcagccatttagtagtgatcacaccggctcaagatggcgaattagtccgcctacttttgcaagcggaggagcaaacaacggcatatttgacgcaactccaggcggcagttgatccggggagcttgtatttaggaatcagtgccaagcgagcagcagccccccaacttagcgggttaattgcattgagtcagacgaccggagttccgctggttgcgttaggtgatgttcgttatctagaaccagatgatgctttttcagtgcaagtcttacaacatattaaagctggtacgcaagttaatctccatagtggtgatcagacaacgccaggcggctattatttacaagctgctgatcagattacggccgagtttgaagcattgcagttggtcgaggccgtgcacaatacggataagattgcccaactctgtcaagttgagttgacctttaagcgggcccaattaccacgctttgaaacaccgcatcaagagtcggcaacggcatatctagaacagttaagtcagcaaggcttacaagttcggtttgccgatcaagcgattccgcaagaatatcaagaacgcttgcagtatgaattgcgagtgatcaacgagatgggctttgccgattatttcttaatcgttgccgatgtcatgcggcatgcccatgaacaacatattatgacgggcccagggcgaggctctgcggcagggtcgttggtggcctatgctttaatgattactgatgtcgatccgattcaatatcaattgttgtttgaacgttttttgaaccccaatcgggcgaatatgccagatattgatttggatatcccagataatcgtcgggatgaagtgctggcctatgtctatcacaaatacggtcggaatcatatggcgcaaattattacatttggcacactggcagctaaaatggcgttacgtgatgtggggcgtgtgtttggcttaagtcagtttgaaatgaatgattgggctaaggtaattccggacatgctgaaaatcacgttaaaagaagcttatcaacaatcacaaccattgaaaaatttggtggccgattccgctcaaaatcgattactattcgagacagcacagaaacttgaaggactgccacgacactactcaacgcatgcggctgggattgtgttaagccaagcaccgttaactgatacggttgcattacaaagtggcggtgaagagattgaacttacacaattgccaatgggcaacgtggaagaactgggcctactgaagattgactttttaggattacgtaatttagggattcttgctaatattgtaaagcttgttggacagcaaacgggacagccgtttgacccacactcaattccgttggatgatcctaaaacacttgcattattccaacaaggtgatactaatggtattttccaatttgaatcacttggcattaagaatgttttacggcggttggcaccgagttcttttgaagacgtcgtggcgacaaatgcgttgtatcgaccaggtccgatggaaaacatcgacgtatttatcgctcgtaagaacgggcaagaacctgtcacttatccggacgcgtcgttagccgatattttagagccaacgtatgggatcttagtgtatcaagaacaagttatgcaggctgcgtccaagatggggggctttagcttaggcgaagccgacttattgcggcgagcaatgagtaaaaagaagaaggcggtgattgatgctagccggacgcaatttattcaaggcgcactcgaacgcgggcacacagaaactgctgctacgacagtctacgactatattgagcggtttgccaattatggatttaaccggtcacatgctgttgcttatagtaaaattgctttctggttggcttatttaaaagttcatcagccagcagccttttttgcagctttattaaatgccgttttgaacaatccgacaaaaacgaaaacttacttagcagaagccaagaaacgtcaaattaaagtgctgccacctgatattaaccgcagtcaaagttatttcagattagccgactcagggattatctttggtttgttcagcattaaaaaagttcggcgcgattttgtggcggcgattattcaagaacggacaacgaacggaccgtttaaatcgttactggccttcttacagcgtatggatcctaagtttctcaagcaagaggcattagaagccttgatttatagtggcgccttcgatcagtttaatccgaatcggaatgcgctgttgaccaacttagccgacctgcttgatagtgtgaagttgtcagggaataacgtcgatttatttgctgttttagcaccgaaagaacgtgccgtaccgaatttaaccttgactgaacgattggataaagaagccgaatatcttggggcctatgtttcgggacatccggtcgaaaaatatgattgtgtacgccaacactaccatgtgcctgatatcagtgatttggcacccgagcaaacggtccatttggtgctattcattcgccgaattaaggtgattcgaacgaaaaaaggcgatcaaatggcgtttgtaacggggcaagatgcaaccggtgaaattagtgtgacgctctttactggcgtttatcaacgggtcagtgaatggctacaaacaggacaagttgtttttatcaccgggaaagttgaacaacgtcgcgatttacaagtggttgctaatcagattcaattggcacaagatgcacaaaagacgctacccaaagcgaccctttatttacgggttcaaacggcgttgacgagtcaagcgcaacaacaaatgtatcaattgttacaacaaaatcacggaacaacgccagttatcttgtacaatgcggccgataaacagtcaattctattgaacgagcgctattgggttgtgaacaacgaaaaactaacgaccgcgcttacaaaccttttagggacgggaaatgtgattttaaaagggtttgaccaataaagaaattggtctatctttgcgaaaatcttcgcaaaagacaagacttattttctgaaaagtgataatatattagtgactttaaaagaccaattggttttttaagtaaaatatttgcctggggtgaaaagatgaaacgcataggtattttgacaagtggtggggatgcacctggtatgaacgctgccatccgtgccgttgcaagaaaagcaatgcatgaaggccttgaagtctatggtatcaattatggttacgctggtttagttgccggagatatcttcaagatggacccaattacggttggtgacaagattcaacgtggtgggacattcttgtactcagcacgttatccagaatttgcacaagtcgaaggacaattgaaaggtattgaacaactcaagaagtttggtatcgaagctttagttgtcatcggtggtgatggttcttatcacggtgcacttcgtttaactgaacatggttataacgcaattggtcttccaggaacaattgataatgatattccatttacagatcaaacaattggtttcgatacagctgtgaacacagtgctcgaatcaattgaccggatccgtgatacagctgctagtcacgaaagaactttcgttgtggaagtaatgggtcgtggcgctggtgatatcgcgctttgggctggtgttgccggtggcgcacaagacattattatccctgaacatgatttcgacgttaaggccgttgctgataagctacgtacttcacgtgaacatggtcaaaaacacgctgtcattgtattggctgaaggtgtgatgcacgctgatgaattctcagaaaaactttctgaatacggcgatttccacttacgttcaactgttttaggacacgttgttcgtggtggggcaccaacagctagtgaccgtgtgttagcaagtcgtttgggctcaaaagcagttgaattattgcttgaaggcaaaggtggcgttgcacttgggattgaaaagaacgaaattatcgcacatgatatgttagacttgttcaatcacaagcatcacgcaatgttagatctttatgatttaaacgaagatttagcttactagattcatcgttccatatataaaattgttaaaacgactgaaaagtcttttaaaaaatagacataaaaggagagattccacttatgaagaaaaccaaaatcgtaagtacacttggacccgcaagtaacaatgttgaaactatcacaaaattaatcgaagcaggtgctaatgtattccgctttaacttctctcatggtgatcatgaagaacatttaagccggatgaacatggttcacgaagctgaaaaattaactggtaaaacagttggtatcatgttagatacaaagggtgctgaaatccggacaactgttcaacaaggtaagaaatttgaattacacactggtgaagtggtacgtatttcaatggacgatacacttgaaggaacacctgaaaaaatcgctgttacttacccaggtctatacgacgacacacatgtcggcggacacgttttaatcgatgatggtttagtggatcttaaaattattgaaaaagacgaagcaaacaaagaacttgttactgaagttcaaaacgacggtatggtcggctcacgtaaaggtgttaacgcacctggtgtttcaatcaacttacctggtatcacagaaaaagatgctagcgacattcgttttggtttagatcatgaaatcaactttatcgctgcaagttttgttcgtaaacctcaagatgttttagatatccgtgaattattagaagaaaaacacatggaacatgttcaaatcttccctaagattgaatcacaagaaggtatcgacaacattgacgatatcatgaaagtttcagatggtttaatgattgctcgtggtgacatgggtgttgaaattccatttgaaaatgttccttttgtacaaaagaacttgatcaagaaatgtaacgctattggcaaaccagttatcacagctacacaaatgttggactcaatgcaagaaaacccacgtcctacacgtgctgaagttaacgacgttgctaacgctgttattgatggtactgacgcaacaatgctttcaggtgaaagtgctaacggtgactacccagtagaagctgttgcaacaatggctcgcattgatgaaagaacagaaaaatcattaacagaccgcgatgcatacgcattgaaagcatacagcaagactaacttgacagaatcaattggccaagctgttgctcacactgcacgtaacttaggaatcaagacaatcgttgctgctacagaatcaggctcaacagcacgtatgatttctaaataccgtccacaagctgacatcttagccgttacattcgacgaacgtacacgtcgtggtttaacagttaactatggtgtatacccagttatcgctaagaaacctgctaatacagatgatatgttcaacttagctacacaaacagctcaagaacatggttttgctaaagaaggcgacctaatcttgatcactgctggtgttcctgttggcgaacgtggcacaacaaacgttatgaagatccaattaattggttcaaaattaacacaaggccaaggtgttggcgatgaaacaatcgttggcaaggctgttgtcgcttcaaacgctaaagaagctgctgaaaaagcaattgatggtggtatcttagttgttaaatcaactgacaaagattacttaccagcaatcgaaaaatcaagtgctatcgttgttgaaaacggtggtttaacatcacacgctgctgttgttggtatcgctatgggtattccagttgttgttggtgctaaagacgcaacagaagctatcaaagatggcgaagttgtgactgttgattcacgtcgtgggattgtttaccgcggtgcaacaaacgctctttaatcattcctgaatgatgaaatgaagccccctctgaaaagagggggctttttttgttttaaaaatgcgaatcttgaattacttttctgaaagtactgacaagtcgttcatttatcggtacaatagtagggagactttattggaggtttacatggaaagttggttatttttagtagcgattttaatcgttgcattgttagcgaaaaatcaatctttaatcattgcgaccgcggttgttttaatattaaaggtattcccgatttcaaataaggtgctgcctgtgatccaagccaaaggcattaattggggagtgacagtgatttcggttgctatcctagtcccgattgcaacggggcaaattggtgtcaaagacttaatcaatgcctttaaaacgccggcgggttttattgcagttggttgtggcgtgttagttgctgtactatcagcgaagggtgtggggctattgtccgctagtcctgagatgacagtggccttggtttttgggaccatcatgggtgtcgtttttctaaaagggattgcggctggccccgtaattgcagcggggattacttataccattttaacggtctttaatttagtaccaattcattaattaataagaataaaagaggttaactatgaatgaattaatcgggcaagtcattactgccttagtaacagatgaaaatgaaacagccttctttgtccaaaaagacggcgtgacatttgaattaaaaaaagaaactttagaacaagaattgacaatcggtgaaacggtgactggttttgcttatgaaaactcaagtcgggaattgatcttatcaacgtttattcctaaatcacgcgtgggccattatgcctttggtgaagtggttgaaacgcggcgtgatttaggcgttttcgtcaatattggcttgccagataaggatattgtcgtatcactggatattttaccaaccattacgaaattatggcctaaaccaggtgatcgtttaatgattgcgattgaagtcgatcaaaaagggcggatgtggggccaactagctgacgaaagcatcttcagatcaatttcaaaaggtgctaaaccagaaatgaagaaccaagacgtgatggggacggtctaccgtttgaagttagccgggacgtttattttaacggatgacttttacattgggttcattcatccttctgaacgtgaagcagaaccacgtttgggtcaacaggttaaggggcgcgtcattggtgtgcgacctgaaggtagtttaaatgtcagtttgaaaccacgggcatatgaagaaattggcgacgatgctgaaatgattatggctgtcttaaaacggcaacctgattacgcaatgccatacactgaccggagcgatccagaagcgattaagagttactttgggattagtaaaggcagttttaagcgggcattaggccggttaatgaaaaatggcttaattactcaagcagagggcctaacgagtttaactgaaaaaggtcaagctgatattgccccaattacagatgacgagaagcaagactaagcttttttgaatgattgaaaaggaagttgctaaatggataaagctgagcaattagaccgaatatccgagcagctacaagcggccggctacaagttaacagcacaacgctctgcgacggtggcggtcattttggaccatgcccaagcgcatctgagtgccgaacagatttttatggcaactaaagaggtggtccctgaaattgggttggccactgtgtatcgcacccttgagatgttgacggaactgcatgtgttgaataaagttcggttcattgaagatgggatgacccactatgacttgtgtgagactgatcacgaccatcatttccaccatcacctgttgtgtctgcaatgtggggcaatcgaagaaattcatacggatttattgcctgccgtggaacaacaggtatatgatgattacacatttacggtgttagatcatcgtttaacatttcacgggatttgtgcacgttgccaacagattaaccaacaaaatgggttaccagccaatcaactggatcctagtcgccaaattgacgtgacgcagttgtaaaagaggaagtacatggatgatttaattcaagattatttacattatttaaaagttgaacgcggtctttcggagaatacgcgccagagttatcggcaggatttacaacagtttgcggcgtttttacaacgtcagcaggttgccaattttactgaagaccgctttttaattttgaactacttgcaagaacaaactgatgtgcataaggcacaaagtagtattacacggagcatttcaacgttacgtaaattctatcagtatttagcgcgtgaaaagcagattaaacaaaatccgatgctccaaatcgattcgcccaaacaaggccgtcatctaccggctgttttatcgacggcggagattgagcgactattggcggcaccagatacgagcaccgcacttggattacgagatcgagcgattctagaggttttatatgcgacggggttacgagttagcgagctgattcatctaaagatggctgatttgcatttatcactgggcttaattcagaccctcggcaaagggaataaggaacggattataccgattggtgatgtagcggttgattggattaatcaatacctcgatcgtagccggaatcaattaacgaaggggcgtgctaacccgtacctgtttgttaatttccatggtaacgggttgacgcgccaagggatttggaagaacctgaaggcacatgttaaaacggctgggattgaaaaagacgtgaccccacatacattgcggcattcgtttgccactgtgctacttgaaaatggcgcagatctgcgaattgtacaagaattattggggcattcagatatttcaacgactcaaatttacacgcatattagtaagaaacatttgacagaagtttaccaatggagtcatccacgcgattaaattagatttgtcgcgctttataaactatggtagagttaatgctattagaactttgtttgatcaatggaggtcaacatgttattcaagtataaaaatgattatgaaaagattgcgatgggctttttatccttcgtaccggatttaaaagaagtcagtcatgtacaagctgaattggcgctctatacgtcggatgagcaacgcaatttatatttatggcgcaatgaagccggcgattttgccggtgttgtggggattgaactgggtgcggactatattttagtgcgccatatttcactgaacccttcggaacgtagcgacgagaactatttcaccatgttggatgaattagcggcgctttatcctgaaagtcgcgtgatgggttcgttagagactgcgccattgattgctaaatgggaacaacatcagaatacagaaatggactagattgaccaatgactgaacaattaacgttggtcttgactgattttgaaggaccactcgatttattattacatttaattaagcaaactaagattgatatttatgatattcccattgctgaaatcaccgcgcaatatcttgattacttgcaccaaatgcaagtattgaaactagatgttgcaggtgattatttagtaatggcggcgacgttgatgaagattaagagtaagttgctcttacctaaggcacctgaattaattgaagaagaaacagaagaatacgtcgatccacggcaggaattagtggaccaactattggcgtaccaagccttccaaaaggtcgcaacggttttgcaagagcgcgaattggagcgccaacagctctttgctaagccagctagtagtaatccagctgaaaaagtggtcccactggcgcgcggcgtgattaagccacgcgatttagcggccgcagtttctaaaatgttggtcgaagcccaagctaaacaaccggtcttcaaaacggtccaaaatgacgaaatttcgattacggataaaatgagttggattgtgcgtcatttagccgctcaaccagttgcttttgaagcgttggtcgttgttaaaacagatcgagatgaaatcgtcacaacatttttagccgtactagaattgatgaaggatcgaaaaattatttgcgaacaagccgactatgatgcaccaatcatggttcggttgaaggagggcatttcagttgaatcatctcgctgaaattgagagtttattatatgtcgcgggggacgaaggaattgcgcttgcgcaaattgcgcagcttattcatctcgatgaaccggcagtccgccagttattagaaaaattggcaaatcgttaccgcggcaacactgaatcgggtttgaacctgattcaagccgaagatatctataaattagtcaccaaaaaagaatacgcgacgttgttgaagacctattttgatggaccggtgtcaactagtattagtcaggccgctcttgaggtattggcaattattgtctatcgccaaccaatcacgcggattgaagtcgatgaggtccgaggtgtccaaagtagtggggccatccaaaccttgttagcccgccaattaattagcgaaaaagggcgtaaggatgcgcccggtcggccaattttatatggaacgagcacctatttcttagattactttggtcttgaatcgctcgatgaattaccaccacttgaacaattggcacttgacgctgatgtcgatggtagtgaaggtggtacagcagacttgtattaccgtcaatttgaacaaacgttaaatgaaacagatacgacgtcggaagagacgtccaaaggagaacaataaatggaacgattacaaaaagtgattgcaaatgctggggtagcttcaagacggaaagcagaaaccttaattgcaactggtcacgtcaccttaaatggtgaagtggtgaaggaaatgggtatcaaggtggatagcacaagcgatcatattgaagttgacggtgtgccgttaacgcgtgaacgcaaggtctattatgtcttgtataaaccacgccaagtgatttcagcagtgacagatgataagaaacgccgggtcgtcactgaataccttggcgatatcgttgaacgggtttatccaatcggccgattagattacgatacatctggcttattactactaacgaatgatggtgattttgccaacatgatgatgcatccaaaatataaagtcgacaagacttatattgcgaaggtttcaggattaccaactgcagatatgttgcgccaattgcgtaaaggaattgtcttagaaaaacgcaaaacagcaccagccaaggtcaaagtaatttcaactgatcggcgtaagaacactgccattgtaagcatcaccattcacgaagggatgaatcatcaggttaagaacatgctagctgcggttggcctacccgtaacaaagttgaaacgggaaacatatggtttcttaacgttagatgggttagtttctggcgaataccgtgctttgaaaccaatcgaagtcgcagaattcaaaaaaattgctgaactaaatgaaaaaccacagcataagaatcgaccaaaattatcacggcatgattaattagttgcttttggcacgttgatttgctatgcttatttcgaacaaaatattaatggttcgtcttcaggggcagggtgtaattcccgaccggcggtaaaagtccgcgacctgctacaatgttgattcttgtggtggctgaactggtgtgattccagtaccgatagtgaaagtctagatggaagaagatagggcttatttgggtatgaatgtatgcaagtaaggtctgttaatctccctgattaacagacctttttgatgcaatcagacttggctaagtccgctgacgaaggcaacctcatctggagggtgttagtaatgcaagtttcaaaagttcgtacgatgattggggtcgcaatgctaggggcaatttcatttgtcgtcatgtttttcgaatttccaattattctcgcatttccgtttttaaaaattgattttagtgacgtgattgtcctgttagggacgttcgtttacggaccaattggaggaatgggggtcgcattgattcgctcgacgcttcatttcattatgaccggtgctagcttaccgagtttggtcggcgactttgccggtgtcttggcgtcaatctgctacttgttaccattctattatttattcaagcgtcaatcgaacgttttagtaggtcaagcaattgctggtgttgcgggggctgtcagcatgacgatcttcatgtcatttgctaactggcttttcattttaccgctctatattaaattgatgggtttgaacttaggaatgtcgactaccaaatacattctatttggattagtaccgtttaatttaattaaaggtgcactcgtaacggtggtgtttgccgttttatatttacggattttaccatggctaaaacaacatatgcaaaaaccaattgccaaataaatggcagcaaaaaaggttgtgtccaagcgggcacaaccttttttataggacgtaaatatgctacgataaaaatggcgttgattggcgtacaatcgcaccagttggacaggcggtgtaggcggttttaaacgcaattcgttctttaggatcttcaattggcgtcgttccctgattatgatcgggtttaaaaaaggcgatcccttcttgatcgtaatcgaataagtcgggcgcctttagctggcagagaccgcaggcgatacagcgttccgggatgacttgactatagagcattaaattcacactttctcaataaaggacttaattgatgatgttaatggcgtatctactatgcttgttggcgcctgagaaaaggcggtatcaagcaatctactataccttaattggtaaacgaactacttcaaatctgtatgccggtttagcatatggattattaaaatggctccaaatttatcctaatctagaacaggcacaatttcaagcagaattaaaacgacttcagcaaaatggttggattgaaatcgatgagcggtatgtttggttgactgctaccgggcaacaaaaacaagctgaatggcagccgcaattagtttggccgacgcactatgaaggcccacagatgggtcacttaccccaattcactgctcgttttatgttggccgttcaaattgtgtcggaatatcatcatcaaaatacgcagtactatccattggaaacgagtatgaaggaccgcgtgttggtggtcagttggtttaagcggcataaggcaaccatcaattttagcagtcaattccagctagaattggcgcaattacttgaccagttagatccgcaacaagccgatcttgtggcaaatcaactgatcggacatcaagtcttgggcaaaagccaccaacaactggcgcaagccttagatagcccatccttgacagttcgtgtgcggaccatcgacgcctttgctcaaattttagggcttttattggcgcaccaaacgacttatccgctattgaatgaattagtggatcaggctgaaacgcaattgagtcagagtacgttacagacctggcaattgatccaacaaggggcgagtgttaaacaaatcagccgccagcgccgggttaagatcggaacgattaaagaacaccttttagaaaccgcgatgttactcccacggtttccgtttgaacaattcttaaaggatgcaactacacaaaaactagctagattgatgactgaacagccatcgctcagctataatgaagcacaaaccgcactccccggtctagatttctttgagtatcggctttatcaaattcaaaggcaggtgaacgcccaatgagcacggatgaactgatttataaaacgctaaaagagcggtttggctatgagacatttaagccaggacaattagaagtgattcaatctgttttggcgggccaagcgactttggcggttttgccgaccgggacgggaaaatcattatgttatcaattaccagcctatcttttgggccataccactgtcattatttcacctttaattgcattgatgcaagatcaggtcgcacagttgaattaccaaggtgaaaaaaaggcagtcgcgattaattcaaatttggaaccgcggcaaaagcatgcgttattgcgacaattgccacagtatcgtttcgtgtttatggcgcctgaaacgataagccagccggcggtcattcaagcactacaacaatgccagattgatttattggtcatcgatgaagcccactgtatttcacaatgggggattgattttcggccggattatttagtgcttgcgcaaatcaagcaccaattaaatccgggggcaacgctcgcactaactgcaacagctgatgcacaggttcggcatgatattttagccaagctagatttgcagtcggccaataggattattacgtcggttgatcgtcctaatatttacttaggggtgagtcaacaagcggatgaagcgagtaagcacgcctttttgcaacaattggtaactgagagtcaggggcccgggattatttatttttcaagtcgtcaaaagaccgtcgagattgcggcttttttgcaacaaaagacagcgatgcgagttgcctattatcacgcagcgctttcgccacaggagcgcttcattattcaacaacagtttatgcaagggcagttggacgtaatctgcgcaacgaatgcatttggaatggggattaataaagccaatattcgctatgtgattcactatcatttaccgcaaaatatcgaaagttatctacaagaagtcggtcgtgcagggcgcgatggccaaccagcctatgcaatgttgttagcaacaccgcaagatacgtatctgcaacagtcgttagtgtcatttgggattcctgaagctggattgattcggcgtttctatcaagaaccgacattatttaaacaaagccaaggcaacgagtttgaattattacggcggtatcagcaaattgggatggatgaacaggccgttagtgaactgttacagaatcggcaaaaagaaaagcgttttgcgcttcaaacaatggttgattatttaaacttacaaggctgtcggcggcaatttattgtgaactattttgacgagcaaccccaacaggttgcccatgctgatcaatgttgtggtcaacaggattcaacggtctttttagaaaaatttaatttaaaaacgttaactgatgataaatcccctaaaatagacgggttagaccattgggacggtattttgaagcaattgttttagagattttctgggtattttaaaagggtctatggtacaatatcaaagaataccaatagggagggccgtcaatgctcaaagatgataagaaaaaattagataatcagacggaagacaaaccctgggaaagccagtttgatgatgatcgtgatgatcgcgggaatttatcgcgtgttgcttccaagagtaaggaaaaaggaaatacatattttgccattattctaggtgtattgcttgttttaatgattgcatttccgattattgcctatacgattcattctagccgggctaaccgcccagtcgagtctagtaagattgtcgttaatacttctgatagtgatagtgcttctaagaaagaagctaaaaaagcgaagtctgctagcgaaagtgctaccaaagcggccagcgaaagtaaagctaaacaggctgaaagtgaaaaagcggctagtgaaagccaagcagttgaaagtagcaaacaagctgcagaagaagctgaaaaggctaatagtcaaagccaagctcaagcagacgctcaaaatagtagtagcgaagaaacaacaactgaaagtagcagttcaagcgaaacaacgggtggttcttatacgttgaaagccggcgaaggtttataccgcgcagcggttaataacggtttaacactcgatcaactacttgcattaaaccctgggttaacagccaattcacaagtggcaccaggcacagctctaaaagttaaataatcagtactaccaaaaggcctggggaaactcccagccttttttaatgattttttcaggaggcagaacatgcaaattgcaattgatggaccagcatcatctggtaaaagtacggtcgccaaaattgtggctactaaattagggttcgtatacgttgatacgggtgctatgtatcgcgcatcaaccgtgttagcacagaagttagggttagacttcggggatgaagcgggaattttagcagctttaaaagaagcagatatccaatttaaacctgaccaagcagggcaaaaagtcttcttgaatggtgaagatattacattagccattcgaacccctgaaattacgaataatgtctcacaagtatcagctttagctggtgtgcgcactgagatggttgcacggcaacgtcagattgcagatcaaggtcaagtcgtcatggatggacgcgatattggaacaacggtgttacctgctgcgaaggttaaaatttttatggtggcaagtgcccaagaacgagctaaacgccgttatgctgaaaatacagctaaggggattatgacgcctttagcaacgctacaagcagagattgaattacgtgatcaaaaagatagtacacgggccatttcacccttaaaaaaagctgacgacgccattgaaattgatacaactcagttaacaatcgatgaggtggtcgacacaatattagcaattgtaaagaaaaatatgtaattttatctttgaacgaggtaaaataactggtaatccgaatagatatcaactaaaatagtaactgtatagatagtcgttaaggaggattttagctatgagtgaagctaatttgaataacacccaaagcagcgatgcaatggcagctgctttagacagtgtccacgaagtcaaaattggggacgttgttaaaggtgaagttttagcaattgaagatcgacaagtgattgtcggcatcgaaggaactggtgttgaaggggttgtgcctcaaaaagaattatcaagtcaacctattgaagacatcgcagacgttgccaaagtaggcgaccaattagatttagtggtcatttcaagaatcggtaacgataaagaaaacgggagctacttattatctaaacgtcgcttagaagcccgtaaagtttggtctgaaattgaacaaaaatttgctaatcaagaaacaatcacagctaaagttatcgacgtggttaaaggcggcttagtcgtcgatgctggtgtccgtggcttcgtaccagcttcaatgatttctgatcgtttcgtacgtgatttaagcagctttaaaggccaagaattaaccttacaaattattgaaattgaaccaagtgaaaaccgtttaattctttcacgtaaagcattattggaacaagaacgtcaagctaagttacaagcagtttttgaaaaaatgttacctggggatgttgttgaaggtgaagttgctcgtttgacaaactttggcgcattcatcgatttaggtggcgttgacggcttagtccacgtttctgaaatttcatatgatcacattaaccaaccttctgatgtcttagaagttggtcaaaaagtgcaagtgaaagtcttgagcttagaccaagaaaaaggccggatctcattatcaattaaagatacgcaacctggtccttgggatgatatcgctgataaagcaccagttggtagcactttagaaggggtcgttaaacgtttaacaacatttggcgcctttgttgaagtcttccctggggttgaaggtttagtgcatatttcacaaatctcacatcaacatatcgccacaccaaacgatgtgttagaagaaggccaaacggttcaagtcaaggtcttatcagttgatcctgaacaacaacgtttaggtttatcaatcaaagcattgcaagaaaaacctgctggtgctaaggattcagaacacgaagatgtggcgccttctgactatgtgatgccagaagaagaaacaggtttcagtatcggcgacatgcttggtaaaacattagacgataaataatttttttaaaagtcatatgcaaaaaggtagggtctgggacaaaactaggttttgtcccagaccctacgtttatgtcggtgattgattagtacgacgcagaggaagcggaagttcagcggactttgtcggagtgaccttgtcagtttggctcagacagggtacactgaacaacgaagggaatgaatacaatgacaaaaccagttatcgccattgttggtcgacctaatgtcggtaaatcgacgatttttaatcgcattgccggtgagcggatctcgattgttgaagatacgccaggggttacgcgtgatcgcatttataccacaagtgaatggttagggcatgaatttagcctaatcgataccggtgggattgaaattagtgacgcaccatttatggaacagattaaacaacaagcagaaattgcaattgatgaagcagacgtgattatcttcttagtgagtgcacgagaaggggttactgatgcggatgagcgagttgcacaaattttataccgcgctgacaaaccgatcttacttggggttaataaggcggataatccagaacaacgccaagatatttttgatttctatagtcttggctttggcgaacccatcgccgtttcaggggctcatggtcaagggttaggtgatcttttagatgccgccgttgctaagttcccagctgaagatgacgaagaagaagacgatagcatcaagtttagtttgattggccgtcccaatgttgggaagtcatcacttgtgaacgcgatgttaaaagaagaccgggtaattgtctctcaaattgaagggactacgcgggatgccatcgatacgaagttcacggctgaagataatcaagaatttaccatgattgatactgccgggatccgtaaacggggtaaggtctacgaaaatactgaaaaatacgccgtaatgcgtgcattacgtgcgattgaccgttcagacgtcgtattagtcgttttgaatgctgaagaaggtattcgtgaacaagataagaaagtggctggctacgcacatgaagctggtcgtgggattatcatcgtggttaataagtgggatacacttaaaaaagacaaccacacgatgaaagagttcgaaaatcacgtgcgcgatcaattccaatacttagactatgcgccaatcatctttgtatcggctaagaccggcgttcgcttgcaaaacttgccagcgatgattgaacaagtgagtgaaaaccaaaaccggcgcatccaatcagcactcttaaacgaagtcttgatggacgcaacaacggtgacaccaactccagctattaatgggaaacgattgcgcatttattacatgacacaagtagcggttcaaccgcctacatttgtggtcttcgtaaacgatgttaacttgcttcatttctcatatcaacgtttcttgaagaatcaattacggaaaacctttgactttactggtacaccaatccatttgatccctcgtcaacgaaaataagctgttttttcaaaaatccgctaatatgattaactaatttgctcagaatgctgttttttagcgaaattccttgctatcactaggtttgtgtgataaattaaaaaatgaaatggtgatcaaatcattgtttcgtcatttttgaccactcaaaaatggtttcggtaattaattactgattatctgtgatgagcaggaggtgaaaaacatggcaaacaaagcacaattgatcgaaggcgtagcatcaaagactggtttaactaagaaggatgcaactgctgcagttgatgcagtatttggttcaatccaagacactttgaaaaaaggtgacaaagttcaactaatcggctttggtacttttgaagtacgtgaacgtgcagctcgtaagggccgtaacccacaaactggtgcagaaattaagattcctgcaagcaaagtacctgcattcaagccaggtaaagcattaaaggattctgttaaataagaattcaatttataggctgggatttttcccagtctttttttattggcaattaatccgaatatgttaaaatggaacaatcgaaaaagggtggttaaatgacgaattcagaacaaatgcttacagcattagaagataataatttagaacaagcacagacttacttccaacaagccttagttgctgatgaacccgatacgctctacagcttagctgaagagttatatgcgatgggttttttggaacaagcaacgacaatttaccaacaattgttggcccaatttcctgaagaagatcaaatcagaacaacactagcagatattgcggtcagcgatggccaatacgacgacgccttgaacttgttggcagatattacgccagaatccaatgcgtacgccgaaagtctgctgacggcagctgatgtctatcaaacaatgggcttaccagaagttagtgaacaaaaattattgacggcgttgcgcttatatccagatgaacccgtcatgcaattcgcattagctgaattgtactttgaaatgggtgaatatgtgaaggccgccaattactatgagacgctaatcgaccaagacgttgttgaactgggacaggtgaatattcaaaagcggttggcaactagttatgccagcagtggggcttttgaagaagctttgcagatttacgaagggttgacgccagaatttctaacagaagacgatcaattccagatgggctttttgtacttacaaattaaggattatcaaaaagcaattgaaatcttaaccaagttacagacgactgatccacaatatacgtcactatatacttacttggcagcagctcaagaggctcagaatcaattagaagacgccttaacgaccgttcagaccggaattgggtacgatgcctacaacgaggtcctctatcaaaaggggagcgatctagcgcttcaattaggcaataacgaggttgctgaacagatgctaaacgaggccctcaagattgatcctgataatatgggcgaaattagtgccttgagccaagtttatcgccgtcaaggccgccatgccgaaaacattgctttcttacaagatgcgattgaaaatcataaaccaacggctgatttatattggtcattggcgcaatcacagatggcggtggatgatgttgaccaagcgcgcgaaaattatctgttagcttatcctgacttgaaagataactcggactttctacacgatttaattttattcttccaagaaatggcacaggtcccagaaatgttcgcggccctcaaacaatatttgaagctcgtgccaaacgatttagagatgcaaactctctatgacgattaccaagccatgcaataatgcaaaaaaacgcccgactattactttagtcgagcgtttttttgcgtctttagtcgcgtttcttccccagatgaaagtggtacattgaagaggaatcgggaacaggatttatttggggaggtttttaggatgacaaacacaatactttcggttgcccaactaacacaagtggtgtcaattgggcagtctgaccagacgacaaccttattgaaaaatatttcgtttacggtgcaaaaaggggagttggtcagtattgttgggccttctgggtctggtaagagtacgttgttgtattgtatttcagggattacgcgacctacaggcggcactgtggcaattgcggggattaatccgtatcaattgaaacccaatcaactagcggcttttcgcagacagacgattggctttatttttcaacaatacaacttgattcagtctttacccgtctttgaaaatgttgtcttacaacagcgcttgagtcatcagcaaccgcaacgtgctgagattaaacagttactgaccaaaatgaactttgcgggacaaatcgatgggcctgttgcgactttatcgggtggtgagcaacaaaaagtcgcgattgctcgcacgattctaactgattgtgatgtgttatttgccgatgagccaacgggtgcgctagattcggcatccaaagcgattatttttacatatttcaaagagatggttgctaaagggagaacggtgattatggtgacccacgatattgagctggctagtcagacagatcgtgcgattgtattaaaagacggtcaggttcagcaaattgtgactgaaccgacacttgcgacaatctatgccgccttggatcaggtggtgtaagcgatgtggacaatcagttggttacagttaaagcattcctggcggcaatggctagcaacaataccagtttttgtaacagtgggtttaatcctcggtttttgtttaacgggaattgtgaatgtggcacagtcgcagcaagttgatctatacggtccgaatacaccgttgccgatttttatcatgccggtattttttggtggtattacaatggtaatcgtgattaaaggaatcgtgcaccagcttttggatcagtttaaaacggactatcgaatgcttgcgattctaggggcaacgatcaatgcactggctgctattttggggatttaaatcggaattgtcagtggggtgagtgctctgctcggcggagtcgttgccttgccactaacgcgtttttgttatgcgtggttgcagcagattgttgggccccaaatgttgccgaatatgccaattcatttttcgttcttggcacttttgttaacggttgtcttggttagtctaattgccggtagtggtggtttttggcatgcacgccatcaactaaaagatgggaataagcatctcagtcaccgacggcggatcgttcgtagagttaggacgattgtttcgttaatggtcgtcagtgggttaattattaaactaacgatgcaaagcatggcgttaacctatgtcggtcattccgagaaagcaattggcagtctcggcaattcggttggcaacctgaatctcgtgttgttcttattattaattctaattgcgcttaccggacacacggtattaaaattaattagccacgtgctctattggttaggtgctagaacgctctttttgaacatggcagcccatgatattgactatactgctgaaaaatatttgccgttgtatacgccagtgacggtcattgcggttttaattacggggatgtcggcaattatgtggaatataccggcctatacaaataccacgagtgccaacaatgaacgtttggtgaatttcattttgacaattggtttatatttgggcgcgccgttactgattgtattagcgaatgtattggcgacgctgttagtcgcaaaagaggataatgcccagcaaatgcgccaattacagttgctcggtttaacaaaacagcaactattgctgacacaacaatcgcatgcagtgatcttagttggtgtttgtcttgcagtcagcctactagccgggggcttagtttggagcctgacgattcatgtcgggcgaaccattttgtaccaagcacccatctcaatggcggctttgctcgctggaccgtttttaatggccgttagtatgctttgcctgctaacgatagttaatttagctcgtgtttattgtgggaaatgtttaactaaagcataaaaaagacagctagtgcatttttaagtgcattagctgtcttttttattggttttgattgcggttaagaatgtcctgcgcccacgcgcaccattctaattctgttgcgcagaccattaagcgccgtttcaaaatcaggtaacgacctaagtttttttgcttttcggtgggatcggttatgaggttgtattcttgcatcttatgttggtattgtttttgaattttttggtaatgatggcggcgatcttggagtaagtcagctgcttgttcttgattgaacagtgaaataacgtaaacttttgctaaaaactcgtcacgttgtgtgggtaaattcgtttcttcttgaaaccagtcagtaacgacgagttggccggcttctgttaaatgataaatcttcttttgtttatgaacgggatcaattttaaccgtgacatagccttgttcgtgcagtttatttaatgccgtgtagatttgactgtggtgtgcttcccaaaataaattaatgtactgctttaattcgtagccgctacacggtttgcgaactaacatacataataaaatatagctaagcgtactcatattatttcaccctttaatcgattaattattgctcagtataccatatttagagtcaacaaacatgtcactatattatgtcaaattttaatgtaaaaattgatatgttttgcaatctaatgtagtttatataaagagaaagagagtgatatgttgctggagaatcaaaataaagggctacgctcggcgtatgccgttgcatttacgtgtatggttgcatttatggggattggtttagttgatcccattttaaaaacgattgcggttaaattaaatgccacaccagcgcaaacgaccttactatttacgagttatatgttggtcacagggattattatgctatttacagggtttatttccactagaattggtgcgaaaaaaacgattagtattggtttgatcattattgttttatttgcggcgttagctggtcgttcacagaccattacgcaattaatttcgctacgggccggttggggctttgggaacgccttgttcctatcaaccgctttgactgcgattgtcagtgtgatgcctgaaaaaacggaacaagcgattatgttatacgaaggatctttaggaattgggatggccgttggaccacttgtgggtggcgtcttagggagtctttcatggcgttttccgttttatggtgtcgccattttgatgtttattgcggcgttgaccatcatggtttcattagaaccgattgctaaacctgctaaaagggcgcctttttttgcaggggctgtcgcgttaaaaaatcatcgtttacgttcaatcgggattattgcattattgtataatttcgggtttttcacgattttagcgtatgcaccattcttattagttgggttaactgaattgcaagttggttttgtctttttcgggtggggcgtgatgttagccattgcatcggttttcattgcaccacggatggaacaaaaaacgaatacccttgtgacgttgttgttgtttgggttaagctttttcttgatctgcttaatggtgatcggtatttatgcagatcaaccagccttagtggcctttggcgtcatcattgctggtttcttccaaggcttggtgaatacgttgttaacgacggttgcgatggaaaatgattcgattgaacgcagtgttgcatcatcggcgtatagctttattcgctttactggcggggcaatcgcaccatttgttgctggtaaaatcgctgagaaatggtcagcgcattggactttttattttgcgagcttaatgattttaattgggattttctttgttctgcgcaatcaaaaatattttgtgacggttgaagaagttgaaaaagaaattgagttaactgagggacaggaattatcataaagacacttaaaaacgccagcgattaatcgctggcgtttttattgattagtcgtacgtaaagccttccccgagtgcttcgtgcacatcaataatggaaacgaatgcgtgcgggtcatgttggttaatcaaccgtttaagataggcgatttcacttggactgacgacacagtacagcattggtcggtcttgatgggcataagcgcctgtggcctgtagaaacgtcacgccgcgttccatatcggccagaatgtcatcggcaattgcttgcgcgtggtcactgattacgagtagccctttggcggcgtaagcaccctcgagtgtgaagttcacaatccgggagaagacgtaagacgcaattaaggtatacatcatatgttcgatatcgaggtaactgagtgagagtgttaagactacgacgtcaaaaagaaggagggagcggcccattggcatccctttttctttttcgataatgcgggcaatgacgtcggtgccaccagttgtgccaccgaagcggtagataatcccactgccgaagccactacataaaccggctagaatagcggcgattaaaatatcgtggtttaaatcaattgtgatggggacacgttgccaaatccatagaaaaacggacatcatcgccgttccgtaaatcgtgtaggcgagtgcgcgtttaccgaggtaacgatagcctagaataattagcgggatatttaacaaagccgttgaatacgccgggtcgatatgcaaccaataccgtaaaatcaaggtaatcccggttaagccaccttcagccaggtgattttgaatgttgatggtcactagcccaaacgcgtagatcgcacagcccagcgcaatcaccgctaaatcacgactagtcgtttgccaagtatgttgtttcgtcatgtcaacgccccctttacataactcaaatatagcacggaatgggggttaaaaacagttggaaccactttggtggctgaagtggggtccttgattgtggtatgataaatagcatcagaaacagttaattgttagataagagggatagccatgaaagtaaccacctttgcgccggaatttgaagcggccctaccaatcttaaaacaaattgaagcggcgggttttgaagcctatttcgtcggcggcagtgtccgcgattatttattaggcttgccgattcacgacgttgatatcgcaacgtcggcgtatccagcagaagtgaagcaaatttttaaacgaacggtcgataccggaatccagcacgggactgtgatgattcttgatcatgggactggctatgaagtgaccacttttagaacggaaagtggctatcaagattttagacggcctgattcagtgacgtttgtgcggtcgttagacgaagatttacaacggcgggatttcacgattaatgcgcttgcgatgcgcgctgatggtgaaattattgatttattcgatggcctgaccgatctaaaagcgcaacaaatcagagcggtgggcaaagccgacgaacgtttccacgaagatgcactccgtatgatgcgtgccgtccgttttgaaagtcaactcggctttgcagttacaccagaaacacaaactgcgattgccaaacatgctgaactattaacgaaaattgcggtggaacgcattcatgtcgaatttgtgaagttgctacaagggattcagcggcaaaatgggttacaaacctttttaaaaaccgggttgtatcaatattgtccagcgttcgcgactgaagcagcgggactgaccaaattagcggcattaccagcgcaacagattcatgatgaagatacggcttggctactagtcaatgcattattgggtaaaacccccgccgccgccggcaaattattgaaacgctggaagagtgctaacgatgtgatcgatgcggttaaagcaggtttgggattattgccagccattctagaccaatcagccgatcagtgggccctttatcaagcggggcaacatgtattagacatcacgttaattgttgcccaattaatgaccaacgaatcagtcgcagttgatcagtggcaagcaaagtatgcggcactgcaaatcaagcaaaaggcggaactcgccatcaatggacaagtcttaatgcaaaatgggtatcaacctggtccgcaactaggaaaaatgttggcgcaactcgaaaaagccgtggtgttagatcaattaccaaacgatcaagcccaattattgcaatcggctgcacaaaactaagccattccctcagaaggtgtgttaaaataaccatgtaagcacattcagaaagggtgacaattgatgacacaacatgtttttaaggaattgaaattttattttagaaatggtgacgcttggaccgtcagccacaaagaattaaatgatatttggattagccgtgttaccaccagttatggtcgcattaatggtggcccaatgcaagagattcacccttgcaagagtttcaaagccgaaatcttacctgaagcggatcatgtgaagtccgaagacatcaacaccggttctcttgaaatggggatgttcggtcgtgcaacgaagtatcaagacatcgaaaaactcgatttaatctttgaagatgatcaagatcgcgcaccaatgcaaatttatttcccattcaagaataaagataatagtggcttagataatatttatcaaagtagccaaatctcacaaaaaaatggtcggttgtacattgtgattgatgcagaacacacaattgcagatatgtaccctgaaatttaaacgttagctcctgacaatattgatcgttgtcaggggcttttttatttgtttacagtttacgacattctttttgtcattttgattgtcagtcgtctgattattcgctatgattgatggtaacgaaagtaaaaaggtgactatattgcaaacattgacagcaacgcatttaacgaagacttacggcgaaaaaacgctttttgaagacatttcatttttaatccgtgaaggggaccgcattggtttagtcggcattaatgggaccgggaaaacgacgttactcaacgcgattaccggcacggattcatacgatagcgggcaggttgaaacgcctaaccaatacgcgatgagttatttagcccagaaaccaagctttgatacgaacttaagtattatggcggcgatttttgccggcgataatccggttttcaagacgattcaaaactatgaacgcgtcttggcggcatatacgcaagatcccactaatccgaagttacagacgcaatacgaacaagctgatgcgcaaatgacgcaacaagatgcttggacggttgatacggatatcaagacgattttgacgcaattacatctaacggatttggatcaaccgattaatacattatctgggggccaacaaaaacgggttgggttggcacaagccttaattgaaagcccagacttattgattttggacgaaccaacgaaccacttggattttgattccattgaatggcttgaaaaacgcttagcacaatatcaaggcgcgcttttaattgtcacgcatgatcgctacttcttggatcgtgttgcgaaccaaatttttgaactcgacggtggtcaactctattcatataacggtaactatgaacaatttttaacccaaaaagctgatcgcttggaacgtgaacaacaagctgcccataagcaacaacaactctacaagcaagaattaacgtggatgcgcgcgggtgctaaggcacgaacaaccaagcaacaagcgcggattaatcgcttcaatgacttaaaggcgaatttaaccactggaccagacgattcggaagtcgatattcagatggggcaatcgcggttaggtaaaaaagtactcgaattaaagaacgccagtttaaaactcggcgatcgtcagattttggatgactttagtattctagttcaagcgaatgatcggattgggattagtggcgtcaacggggccggtaaatcatcactgttaaacgtgttggctgaacgcctcccacttgatagtggcgagttaattgtcggcgaaaccgtcaacctcggctactatacgcaacaaaatgaagacttagatcctaacaaacgagtgattgcatacttgcaagaagccggcgaagaagtcattggtaaaaatggggaccggatcagtgtcacacaattgttagaacaattcctattcagccgtcaaatgcacggcacattgattggcaaactttctggtggtgaaaaacgccgcttgtacttgttgaaaattttgatgcaacaaccaaacgtcttattactggatgaaccaactaacgatttagatattggcacgttgacgattctggaaaattacttggaaaactttaacgggactgtgatcacagtttcgcatgaccgttacttcctcgatcaagttgccgacaaactcttgatttttgaaggggccggcaagattagcaccgaagttggcctgttcagcgattacttggcaaaacaaaaagcaacaccaactaagtcagcgcctaaagcagcgacagcatcggttgaagaagcaccagttgcaaagaccaagcagaaattaacatacgccgaacaaaaggaatacgaacacatcgaagccgacatggaacaattggacgaacagattgaaaccatcaaagcagaaatgaacgcaaacggcgcggactatggtaaattagcagagtggcaggcccaaatggatcaacttaaccaacaactagacgaaaaaatgacccgctgggaatacttaagtgaatacgcaaactgagtgcgttcaaactggtcaggaggttctgagcatttacctagttaggcgaattagcgacgcagtcgatgatttggctaacgtagtaaagcgcaggaacctagtttgaaaagcacgttaaagaaaagaagtgcgttcaaaccggttatgttctgaggattagcctaacaaggcgaatgattgctggaagcaatcgtttgacttgtgtagctaaacgcaagaacatggtttgaaaagcacgttaaagaaaggaatccacatcatgtctgagcaaacctacttagatttagaacgtaccattttagaaacgggtcattataaagaagatcgtaccaacactggcacctatagtctgtttggctatcaaatgcgctttgatttaaacgaagggtttcctttattaaccaccaaaaaagtgccattcgggttaattaaaagtgagttattgtggtttttaaaaggtgattccaatattcgttacttactacaacacaataatcatatttgggatgaatgggcgtttgaacgttacgttcaaagtgccgattacacaggcccggatatgacagattttggtcatcgtgcccaaactgatgcggccttcaatactgtttatcgcgaccaaatgcaacagtttaacgaacggattttagacgatgaagcctttgccaaacaatatggtgaactgggcgatatctatggtaaacaatggcgtgcttggcaaacccgttctggggacacaatcgatcagattaaaaacgtgattgaacaaattaaaaccaatcccgattcacggcgcttaattgtctcagcttggaatccagaagacgtgccaagtatggtgttgccgccttgtcatacgatgttccagttctacgttaatgacggacggttatcgtgccaattgtatcaacgcagcggggatgttttccttggcgtaccatttaacattgcgagctacgcattattgacacatttgattgcgcatgaaaccggccttgaagtcggtgaattcatccatacgttgggtgatgcccatatttacagtaatcatattgaacaggtgaagacacagcttgaacgcccaattcatgccgcaccaaaattgtggctcaatccagataaaacaagcatctttgattttgatgtcgccgatattaaacttgaaaactatgaagcagaacccgcaattaaagcacccgttgcggtttaatgaggaggagcgccaatgttagcattcttatgggctgaagatcaaaatgggttaatcggtcaaaatggtcacttaccatggtcattacccaacgatcttgccaattttaaacacgaaacggttcatgaagtggtggtaatgggccggaaaacgtatgatagtttacccgtccaacccttacctggacgccaaaacattgtgattacgcgacaaccggatttagctgtggctgatggggtgtttgtgatgcacaccaaagcggaactgcttaaatatgagcaagccaacccgatgaaaaagatttttatcattggtggtgccgatatttttgcaatgtacgccgatgatgtcgattatctgtacgttacaaaaattgctgaatcgtttgaaggcaacgtttatatgccaaaattagcgatggatcagttcgaattgatcagtcaaacacctggtgtggtggacgaacgtaatcgctatgcgcatacgtttgaaatctatcaacgccgttagaaagattcaattaagggcggtcgcagcgatgtaaccgcctttttgcttgctacaaaagtgacaactggctttttttttaatcagtaacttttggtgaaaaaagcgtgattgtttgatatactgtcaatagacataatcatagaaatcacggggccgttgattgcccagatttcaagatagaaagcgtggctgaagtaatagtggctaatattaaaattgtaacggattcatccatccaactcactcctgaagaaattaaagaacatcatattacggttattccgttgacgattatgattgacaatacggtgtatatcgatggtgaaaccattacccgcgatcaatttatgactgaaatggcaagtgcgagtgccttacctaagacgagtcaacccgcaatcgggaattttgtcgaaacgtatgaacaattagcggctgatggcagccagattttatcaattcacatgctacgagcaattagtggcactgttgatacagcccgccaagccggcgagatggcgaaagcagatgtaacagttgtcgatagcgactttaccgaccgtgcaatggcattccaagtgttaaaagcggcagaagtcattgaaaacggcggtagcatggatgatgctttagcagccattcaaaacgtacacgatcatacgaagttatacatgggtgtgactgatctaaccaacctcgttaaggggggccggttgagtcatgcggctggtgtgatttcaagtttattaaatatcaaggtgatccttgaagtggctgatagcgaattaaaagtgttacgcaaaggccgggggatgaagaccattacgaaattcatcgatgaaatggaagctgatatgcgcgacttaaagattcgggcaatcgggatttcacatgcggatgggctagaattgagcgaaaaaattaaagcacaattgcaagtagtattcccaaacatcgaaattcttgtccggacaactgatccagtgattgcaacgcatgcgggtgcaggcgcatttgccgttatgtactacacagaggattaacaagattacaattaatgcattaacacactaaggctggttgacatttaattgtcccagccttaactattatctagaaataaccgaggtgtcacgtttgaagaaagcacgacagattttaattgatttaggcttatttgctggtgcgattttagtggtctttattatctggcaactattaacgccacggcccaaccaagcgcctaagacggtaacatcaacgtcttcagcggataaagtgatcaaatcaaaaccaaaaccaaaaaagacgttgcagttggttgcgattggcgattcattgacgcatggtgttggtgatgagaccaacaaagaaggctatgtgtcattagttgccaatcagattcagcaagcaaccaagcatcccgtcaagaccgccaatttcggtgtgacgggcgataccagtgtacagattactaaacgcgtgcagaaacaaaagccgctacagcagcaattggcaaaagctgatattgtgacgctaactgttgggggcaacgacctaatggcagttttacagaataatttttttgagctgaatcaacgtcggattacgactggtcagcaaaaatatcaagcgaatttaaccacgctgatgatgcaaattagaaaatataatcctgatgccccaattttcatcatgggggtctacaatccgttttatgtctatttccctgaaatcactgggatgtcaaaggcggttgctgagtggaatcagaccgccaaaacggttgctaatgatttcaaagatacgtattatgtcaatagtgatcggatgttgacacggggcgatgggcattttgtcaaacagactaaatcgctcgctaaaatggatagtgcacagttgcaaaaaacattagcggctaacgagcagttgaacccctatatcagtccagatgatcatttccatcccaatcataaaggttatcaatgggtcacaaaggccttttggcaagtgatgaaagcacacaagcaaacgtgggattagagaaaggataggttatgacaaccagacaagcacatcaagcagcacagaaaacaacaactaaacggaccatcaattattggaaatacagtttcatcgtcttattagcagtcgtgatcgggacagttggtcttgtcggctacaacgtgacagcccctaagactgaaatgattaaaactgagaaaatcatcaaagctgatagcacttttgaaattcagatgcataagagacaaatcaatagtttagtcacctattatttacaaaactacttggaagattcaaagattaaataccaactcaccctggatcagcaggcgattttatctggtcaattcaagttcttagggtttccggtcgaattcaacctcttttttgaaccgtacgttttagaaaatggcgacgtccaattacgcgccaaacaattagcagtcggacaattgaaggtgcccatgtcgtttgtctttaattacatcaagcgtcaatacaaattccccaaatgggttattttggatgcacacaagagccggattacattacgcctaaatgagttcaagctcgaaaacgggatgcaagtaactgctaaacatatcgatttgaagaatgataagattgatttaaacgtctatatcccgctaaaaaataagaaataaggtgttcagatgaagcagagtttttatcgttacctcatgacccaacgtgatccgaataattatgaaccagttccccaatttgccaacaatgccttttttgaccaatctttccctaaacaaagcggcgattatgaaacattaacgcgctatttggaacttaatggcagctacctcccgagtatgacgatttttgatgaggcgtatgaagcctatcaggaaagcgaacaagcctaatgacttccccgaagcagaaattgtggcggggatgggccattaccggctattggcttctcgcatttttactggctgggacggtagcgattgtgttacggtcgttcattctggtccccgcatcggtgtcagggcaatcgatggccccgacgcttgagtcagcggaccaactcttattacgcactagtgggcccatcaagcgctttgatgttgttgtcttcacccgagctgatcaaacaacttatgtgaaacgggtgattggtctgccaggtgaaaccgttgcataccgcaatgaccagctgtacatcaatggacggcatgtcgacgaaccattcttgaatcaggccaaaaagaaaccagggattttaacatcagattttgaattaaaaaccttaatcggcgaaaagcagattccaaaagatgagtactttgtattgggtgacaatcgccagattagcaaagatagccgtttgtttggtacgatccaccgcgatacaatattaggccgagcagtggcggtctactggccgattaaagatatacaatctttaaaataataattaaaagctgacatactctagagtgtgtcagcttttttgattatcgagtgctaatgatcgtatgaaatgtactgaatatgatgcttaactgaaaaaatgatacgcttaattggtggatgttgtagtccggaattaaatttaacccgtcagccagacatcaggtatgatagaattaagaataatataatcagtgacaaatattaagaatgatgtatatcgcttaactagcaataaaggagttattatgacaattcaatggtatccaggccatatggcaaaggcccaaaaacaaattaaagaacggctcaaagcagtcgatttgattctcgaaatcgtggatgcacgggttccagaatcttccattaatccgatgattgcagaacttggtcaaaacaaaccgacgctcttgattatgaacaaagcggatatggcagatgccaaacgcacacaacaatggattgaaacatttaaaaaacgggggattacagcaatcgcgcttgatgcgcaacataaatcaaaattaccgcaaatcgaaaaagtagcacaagaaattttggcagacaaacttgctaaaaaacgggcaaaagggattcttaatccggtgatccgtgcaatgtgtgttggggttcctaacgttggtaaatcaacgattttgaatcgcttggtgcaaaaaaacattgcggtaacaggtaatcgacccggtgtaaccaagaatcaacaatggttaaaagcgggccaatcactcgaattgttagatacaccaggggttttatggcctaaattcgaagatccagctgtcggcaataagttggccttaactggtgcgatttcggatgcaatttatcacccggatgatgttgtggtgtatgccctcgattatttcaaggatttctatccgcaacaattggtaaaagaataccatgtgacgccggctgaacttgaaatgccagcgcctgatttaatcatggcattgaccaaacgactaggttttaaagaagactacgatcgcttctgtatgaaattcatcacggacgcgcgtaagggtaagttagggcgctttacactcgatatcgttcctgtggaggcgcactaatgaccaaaccagaatcaattgctgccattaaggcacgcttattagacgacatttcagaggaagaagtggcgctcttacgcagtgatgcgcgtgctggcgtgcagaagttactcgttcaatatgacaagcggatggctaagttagcggcgcaaaaagcggcgtttatcgaacgacgccagctagaagaaagtttatggccagattatcccttgattgctggaattgatgaagttgggcgcggcccattagcgggtccagttgtgacagcggccgtcattttgccacatgattttgacctatggcaagtcaacgactctaaacagctttcgtttaaggtgaaacaagaactgtatcgcggtatcatggcacaagccatcagtgtcagcattgggattgccgatgcaccacggatcgaccaagagaatatctatcacgctacggaactggcgatgggcgaagctgtcgctggtttagcagaacaccccgattacctattggtggacgcaatgaccgtgccgacagacatcccacaagaaaaattgattaagggggatgcgcgcagtattagtatcgcctcagccagtattgtggctaaagtgattcgggatcaattgatgattaattatgatcaacagtatccgggttacgatcttgctaataatatgggttacgggacagcgaaacatctcgctggtttagctgaattcggtgttacgccaattcaccgccgcagtttttcgcccgttaaagacgccctatagaaaataaaacagctcctttacgaagataaacgtaaaggagctgtttttttgtgttgactaaaaagcaattattattgaaagtacacctggcagatgggtttggccccatcagtgaattacgcttagccgcatggttagtaacgagtcacaattgggctttatcggcattggagattgcgcagattgcgtgtttaccggagcgatattggctgacctttcagactagttttgacagtctagctctgcaacagaagtgtgccacgcatgaacgttatgttcagtatctgacgattctagaagcagattatccgcaacggttgttagaaacccattgtccgccaacagttttattttatcgcggcgatttaagtgttttgaaacagccatgtgttgcggtggttggtgcgcggcaagccacggagtatactaagcaagccctgcagcatttattgggattaccacaaacaacgacgattatcagtggtttagctcaaggggcggatgcgatggcgcatgaagttgcactccaaaaagggttacgaccgattggcgtgattggaacgggcttgaattgttattacccaccacaaaacgaacacttgcaacaggcggtcgctgaaaaagggttattgatatcagaatacggtttggacgtaacggctaagaagcaccacttcccagcccgaaatcggattattgccggactttgtcatagtttagtggtcacagaagcccgccaaaaaagtggtagcttaatcaccgctaatttagcattacaagccaatcgtaacgtatatgccttaccgggccaggttaatcattcattatcggcaggctgtaatcaactgattttagccggtgcaacaccgcttttaaatcaacaattgttattggacgagttgcattattttgattgagggttaattgttgacaattctgcggcatgttgttaatattaaagtcacaagttacttataaagtaacaaatggaattcaaaggggatttttaatatgaaatatgcaattacagcagtgacaggtcgttttgggcaagtcgcaatgaagacgttggctgacttagtgccagcagaacaaatcattggattagcacggaatactgaaaaagccactaaaatggtcccagttggtgtgaccgttcgtcccggtgactataacgatgttgccacattaacggaatcactcaaaggcgttgaccggttattattcatctcctcacaacctggtggcgatgtgccccgtgcgcaacaacatttaaacgtgattgaagctgctaaaaaggctggcgttaagtggattgcttatacgagtttcccacacgctgatcaagcaacaggtgctttagcaagtgatcacattcaaactgaaaaagcattggcagcatcaggcattgatcatacattcttacgcaataactggtatcttgaaaacgaaatggatagcattaaaggcgcattagcaggtcaaccatttgtttatggcgctggtgaagggcatgttggttgggcactcgaacacgactatgctgaagctgcggctaaggtattagtcaacgatcaaccaaaagcgatttatgaatttgccggtgcgccagccacttatgcggatttagctcaagcgattagcgagttgactaatcaagaatttaaggtagtatcattagatgcggctgattatcgtcaaagcctcgaagacaacggcttacctgctgaagtcgctgaaattgtcactggtattcaaacaatgattcaagatggtgatttagatgaaaccacttctgatttacccgatgtcttaggccgaccattaccttcattaaaagaagcgttacagacgattattaaataagcctgaattgatttcaaaaaggcggttgaaccatgaaatattctcataaacttagtgatgccatccatattttggcctatgtcgatatttttcaagatggtgatttatcaagccaagcgattgctgggagcatcgagtctaatcctagtttagtgcggcggctaatgtcactactggtgaaggcggatttattagcgactaaaccggggacgattgcccctaaattagcgcgcccagcggaacagattacaatgttagccgtttttcaggcgcttgatacagatcaacggttattacacgttgatgaaaaaacaaatccagattgtttaattggtagcaacattcaagcaacccttgatgcggcttatgatcaggtgcaaaaagctgcggaagcggagatggcaaccatcacccttgatcaaattattgcggggatttttgaacgcgatgcacaaaaaaatagtttgtcagtctaagttttttatctggcgactatataatagaagaaatcggggttcgaccaagtggttgaaccccgatttttggtgtgatttgtacgtttgaaaacaatttctctttggcatactgccaaacctatgctatgctttaagctgttaatatcaagcatactatcagttgacaatcgtcaaggtagtgttttatgctaatgaacgatttgaacaaagcgttctgttgaaaggggtttgtccatggcaggcaaaaatttagtcattgtagaatcacctgcaaaggccaaaacaattgaaaagtaccttgggcgcaactataaggttgttgcaagcaagggtcacatccgcgatttaccaaagagtcaaatgggtgttgattttgaaaataattatgaacctaaatatatctcgattcgcggtaaaggcgaaacgattaaagaattaaaaaagcaagctaaaaaagttgatcatatctatctcgcagccgatccggatcgcgaaggcgaagcgattgcatggcatgtttcccatattttaaaactcgatccaactgaaaaaaaccgggttgtctttaacgaaattaccaaagacaccgttaaaagtgcttttaaaaatccacgtagtatcgatatgaaactcgttgatgcacaacaagcgcgacgcgtgcttgatcggattgtcgggtattcaatcagtccattactctggcaaaaggttaaaaaaggcttgagtgctggtcgggttcaatccgttgcgttaaaactcgtgattgatcgtgaaaacgagattaaagcctttgttccagaagaatactggtcattggatgcggaatttaaaaagagtcgcagtaagtttaacgccagtttctacggcgtgaagggtaagaaattaccccttagcgataatgatgcggttcaagcgattttgaaacaaatcgataagactaaggatttcacgattgaagatgttaagaaacgggaacgcaaacgttttgcagccgcaccatttacaacgagttccttgcaacaagaagccaaccgtaagttgaacttcagaacgcggaaaacaatgatgcaagcccaacaattgtatgaagggattaaccttggtggcaaagaaggcacggtcgggttaatcacttatatgcgtaccgattcaacccggatttctaccggtgctaaacatgaagcgtcacaattcatccatgacaattatggtgaagaatatgcggcattaaaggcgcataagacgaagaatcctgaaggtgcacaagatgcccatgaagcgattcgcccaacgtcagtgatgcggacacctaagagcttgaaagacgttttaactaacgatcaatataaaatctataacttaatctggtcacggtttgtcgccagtcagatgacaccagccatttttgatacggtcgcagttaagattgctcaaggtgatgtcttattcaaggcaaacggctcacaaatgaagttcccaggattcacgaaactctatgtgtcatcacgtgatactgaagactctgctaaggataatgtcttaccagaacttgcagttggggatgcggtgaaactcgttagaactgatccagtgcaacattttacgcagccaccagcacgttattctgaagccaatttagttaaggctttggaagaaaacggtgttggtcgaccatcaacgtattcaccaacgatcgaaacgattcaacggcgttattacgtgaagttaaacgcaaaacgctttgaaccaactgagttaggggaaatcgtcaatggtttaattgtcgaattcttcccggacatcgttaacatcgactttacggccgatttggaacatcgtttggatgaagtcgaaacgggtaaagaagactgggtcaaggtgattgacaacttcttcaaaccgtttgaaaaagaagtcgaaaaagcgagtgaacaaatcgaaaaagtacaaattaaagatgaaccagctggctttgactgcgacatctgtggtgccccaatggttgttaaaatgggtcgttatggtaaattcttcgcttgcagtcgcttcccagattgtcgcaataccaaggcaatcgtgaaggaaatcggcgtcacctgtcccaaatgtggtaaggggcaagtcatcgaacgtaaatcgaagaagaatcgcttattctacggttgtgatcgttacccagattgtgattttatcacatgggataaacccgtcggcagaaactgtccgaagtgtgaacactaccttgttgaaaagaaaattaaaggtggcaaacaagtaatttgtccaaacggtgactacgaagaaaccgtccaaaaataattagaaaaatggagactagcaaatgagcacagaaccttttgtaaacgtgattggtgccggattagccggttcagaagcagcatggcaaattgcccaacgcggtgtgaatgtgcacctctatgaaatgcgtcccgttaaaatgacaccggcgcaccatacagaacaattcgcagaattagtgtgtacgaattcgctccgtgcgaaccaaattaccaatgcggttggcttaattaaagaagaaatgcgtcacttggactcattaatcatcagtgcggctgatcaaaatgccgttcctgctggtggcgcattggccgttgaccgcacaccgttttcacaaacggtgacggatcgcttagccaatcatgaacgtgtcacagttcatcatgaagaattaaccgattttccagaaggtcctacgattgtggccactggtccattaacgtccgaaggcttagctgaaaaaatcagtgccttaaacggcagtgatggcttgtatttctacgatgctgcagcgcccattttggataagaacagtatcgatttcgataaagtttacctcaaatcacggtatgataagggcgaagctgcttacttaaactgtccaatgactgaagaagaattcgaaaacttctacaaagccttgattagcgctgaagttgcagaaatgcatgactttgaagaagaaaagttctttgatggctgtatgccaatcgaagtgatggccaaacgcgggattaagacgatgttattcgggcctttgaaacccgttggattggaagatccgaatactggcaaacaaccatacgccgttgtgcaattgcgccaagacaatgcggctgctagtttgtacaacattgttggtttccaaacacatttgaagtggggcgaacaaaaacgggttttccgcatgattcctggtttggaaaatgctgaatttgtgcggtatggtgtgatgcatcgcaatactttcatgaaatcaccagatgttttattaccaacctatcaatcaaaacaacgtgacgatctattcttcgctggtcaaatgactggggttgaaggctacgttgaaagtgccgcttctggactagtggctgggattaacgccgctaaactggcgttggaccaaacaccggctgttttcccaacggatacggcgatgggatcaatggcgcactatattacccatacgagtgccaaacatttccaaccgatgaatgcgaactttgggattttcgaacctttgaaacaacggattcgcgataaaaaggaacggaaccaagcacttgctgatcgcgcacttgaaagtatcgaccaatttaagacgacactttaattagaatcttttaaatcccgccaggcttgtggtaaagtaatactaatcaagcttggagggatttttttggcgttagaacaagaatggcttaatctttttttacagtacttagtggtcgatcggcattactcgccagaaacccaaaaagcttatcaagctgatattcagatgttcagtgcttttttaaccgctaacggcggcttagcgtcgtttaaacaggtcacgccactggacgtgcagacttacttgaatgaaatggatcaaaaagaatatagtcgtgaaactgtcgcgcggcgaatttcgagtttgcggtcgttttaccggtatttagtgaaaaatgagttcgtgcaaaccgatccttttgaagctgttcaattaaaaaagcaacagcataagctgccgcggtttttttacgaaaaggaaatggacgcgctatttgctgccattgatggggatcaaccactcgatcaacggaatcgcgccatcttagaattactgtatgcgacggggatgcgggtgagtgagtgcgcgcagttgacggtagcacaaattgatttcggcttacgcgtcattcttgttcatggaaagggcaataaagatcgctatgtaccattcgggcaccatgctgaacgtgccttgcaagcttatttaaaagttggtcgtgttcaattgatggccaaaaaacaattggaccacgatgtcgtttttgttaatcatctcggagcgccaattacaagtcggggaattgaatacattttagatcagattatcaagaaaacaagtttaacgagtgacattcatccgcatatgattcggcatacctttgcaactcacttattggatcacggtgctgatctgcgaacggtgcaggaattattaggccacagtagtttatcaaccacacagatttacacccatgtcaccacagcccatttacaaaaagattaccgccaattctttccccgcgcgtaaaactcggactaaagtttgatttttttcaacgaaaaatagactaatattagcacacagtcttaaagactgctaaaatagaagtgcgttcaaaccggttatgttctgagaattagcctaacaaggcgaatgattactggaagcaattgtttgacttgtgtagctaaacgcaagaacatggtttgaaaagcacgttaagaaagaagtgcgtcatcaacgggttgtttttgagcatttgcctaatcaggcggattaccggcaacgccggtgatatgacagatgtagcaaagcgtagaaagcagttgatgaaagcacgttaagaaaaaagtaagtgctttcaagcttgttcaacttttgagcactagcacagggaagcgaattagcgataaagtcgctgatttgattcacagcgctaagcgcagaaagttagtttgaaaagcacgttaagccccgcccaatccccaaacaacgttaggagtaattcatatgacaacaatttgtgcagttaaacataatggtaaaacagctatcgccggtgacggtcaagtcaccatgggcgaaaaatttgtgacgaaggattctgctaaaaaggtccgtcgaatttatggtaatcaagtcgcaatcggctttgctggtggtgttgcagatgcctttacgctacaagaatggtttgaacaaaaattagaaaagtattcaggcgacctgcaacatgctgctgttgctttagcgcaagactggcgtaaagatccaacgcttcaaaaattagaagcgatgttgattgcggtcaatgcgactgatattttattaatttcagggaatggtgaagtcatcacccctgatacgctatcggaatcaggtgatcaagtgattgccgtgggttcaggcggcaatttcgcccaagcagcagctaccgcattattacttgaaggaaaagatgacttatccgttgaaaaaatcgtcacaaccagtgttgatattgctggtggaatcgatgtttacaccaaccacaacgtgattgtcgaatcattttaggaggtcgcacaatggacttaatgaataaaacacccaaaacaatcgttgccgaacttgatcaatttgtcattggccaagatcaagctaaaaaagccgttgcggttgcactatacaaccgttatcgccggatgcaactcagtgcaaaaatgcaacaagaaatcacgcctaaaaatctattaatgatcgggccaactggggtcgggaaaacagaaattgcccgacggttagcgaaagttgtcgatgccccatttatcaaggttgaagccactaaatttaccgaagtggggtatgtgggacgtgacgttgaatcaatggtccgcgacttagctgatgtggctgtgcatatggaagaaacagaacaatttaaaaacgttcgtgctaaggctgctcgtcaagcagacaagcgcttggttaaactactagtaccgggcattaaaaaggaacaacgtaagaacaataacaacatgaatgatttaatgaacatgtttaacgcgcttcaaaaaggggaaacaccagctggtttcggacaaactgaaccagaagaagtgacggatgatatccgtaacgaacggttatctgttaaagaacagttagataaaggcttgttagatgaccgggaaatcgaaattcaagttgatgaaccgaaaaaagttgccccaatgaacgatatgatgggccagatgggaattgatttaaacgatactctgggttcaattatgccgaagaaaaaaattacgcggacggtaacggttaaagaagcgcgtgaagttttcattcaagaagaatccgctaaattagtcaaccatgccgatatttaccatgatgcgctccaacgtgctgaaaataccgggattatttttatcgatgaaattgataaaattacggctggtggcaaaaaacaatctggtgaagtctctcgtgaaggggttcaacgtgatattttaccaatcgttgaaggctcacaagtcaatacgaaatacggtgttttgaagaccgaccatatcttatttatcggttcaggggcgtttgctgaatcaaaacccagcgatttaatcgctgaattacaaggacggttcccaatccgggttgaacttgaagatttaactgaaaaagacttcatccgaattttaacggaaccaaacaacgcacttgtaaaacaatacatggcgttgattggcgccgatggggtgcacgtcaccttcacgatggaagcaattggccgcattgctgcgattgccttccaagttaaccatgataccgataatattggtgcgcgtcgtttggccaccatcttagagaagctattagaggatattctctttgaaggtcctgacatgcagatgggggatatcaccatcacagaacaatatgtcaacgataagatcggtaatattgcagccgataaagatttaacccgctttattctataatttttaaaaggtggtattttaagatgatccaaattgcaaacgaatttttaacggtgaccctcagtccaaaaggcgccgaattacaaagtattaagggcgccgtttcggggcttgaatatttatggcaagctgatcccgatgtttggggccggcacgcacccgttttattcccattcgtggggcgttcaaaagcagaccaatatacgtataatggccaaacctatccgatgggtcaacacggttttgcacgtgatcgcgaattcagtatcgaagaacaatcggaccacgccgtgactttcttgttgaaagcagacgctgacagccgggccgtgtatccatttgaatttgaattacgtgtgagctatcgtgttcatgatatgcatctgacggttggctatgacgtccgcaatgttgcgccaagcgggccaatgtacttctcaattgggggtcatccaggatttaaagtcccattaacggatgacacgcaatttgaagattatttcttagactaccgcccacaaaaatcacgggttaagatcccattgcaaggggccttcattaatttgaacgaccggacgttagcaccaaccgacgtcgcaacggatatcaatcaccaattatttaaaaatgacgccttaatctacgaattaaagggtcaagccaatgaattcagtattcgttctgaaaaaacggaccactcagtgaccatgaaattggctggcgccccattcatcggtgtttggtcaccttatccaacagaaggcaaccttgtgtgccttgaaccttggtgggggattgcggataccgttgacgcaagcggtgaactttcagaaaaatttggtgtcaacgaactggctgcaggtgaaacgtttaatgcaagttatgaaattactgttcgttaatgaatgattaaaaaaacgcacttaccaagatggtgagtgcgtttttttagtaaactggctgtaggcgggtaacgcattctaaacgcactctgctagtttttccagtagttccatgctaagatataagttataaaatcataggttaggtagggtaagtcatgactgaagaaaagaagtattacggcgcggatgccatcatcgatagtttagtaaatcatgatgttgagtacgtgttcgggattccgggtgcgaagattgatcgggtttttgaacgactagaacatcccgttaatccaaagacgcccaaattaattttgacgcgccatgaacaaaatgcagccttcatggcggctgggattggtcggattacgggcaaaccaggcgttgtaatggcgacttcaggccctggtgccagtaatttagcgacgggggtcgtgacagcaacggcagaaggtgatccagtcttagccattgccggtcaagtgaaacgcgctgatttgttgcgactaacgcatcaaagcatgcgtaatgccgctttattcgcaccaatcacaaaattcagtgcggaagtccaagaacctgagaatttatcagaagtgattgctaacgcctatcaagaagctgaatccgctaaacagggcgcaacgtttgtcagcatcccacaagatgtcacggactcagaagttcattctaaagtgattaaaccgctaatggcgcctaaattagggccagccagtcccgttgaaacgacgcttttggcacaacggattaaagaagcaaaattaccagtacttttagttggtatgcgcgcttcttcaccagaagtgacagcagcgattcgcaatttagtggctgaaacccacattccggtcgttgaaacgttccaagcagccggtgtcatttcgcgtgatttagagactgatttttatgggcgagttggtttattccggaatcaaccaggcgaccgcattctaaaacgcagtgatcttgttattgcagtcggctatgatccaatcgaatatgaaccgcgtaactggaacgctgaaagtgatgcgcacattatggtgattgatgatatgcgcactgaaatcgatcataatttccaacctgaaaaagaattggtcggcgatattgcgcagaccctagactttttattaccttatatgaaggggtatcaactagcgggcgatgtgcgtgattatttagttgaattgcacgcagaactcaatcaacgtgacacggcacctgaaatgacgaccgataatccacttagtcatccgttgaacattatttcagaactgcaagcacgggtcaccgacgaaatgaccgtcacggtcgatgttggtagtcattacatctggatggcgcggcattttagaagttacgaaccacggcacttgctctttagtaacgggatgcagaccttaggtgtggcattgccatgggcgatcagtgctgctctagtgcggccaaatacacaaattgtgtcggtttcgggagatggtggcttcttattctcaggtcaagacttagaaactgcggtgcgtctgaacttaaacatcgtgcatattatttggaatgacggttattatgacatggtaaaattccaagaagaaatgaaatatggcgaatcagcggccgttaagtttggtcccgttgattttgtccaatatgcagagagttttggtgcaaccgggttacgggtcgaaaaagccgcagatcttggtaaagtattggatcaagcctttgccattgatggtcccgtccttgtagatgtgcccgttgattacaaggataatcaattattaggccaagcattattacctgaccaactcgtttaatttgaggaggaaaatcaatgacaaatgatgtcaaacgcgtttatcaacacggaacgttagccctattaattccggggctctttacagggacaatgaccgttgctgaattattaacccatgggaattttggaatcgggacggcgcacggtttagctggcgaactggtcttattagatggccatgcttatactgtgaatggggatggccaagtgactgaactcgcacctgatgcgacagttccatttgcgacagtgcattggcaagattcatcattacctacacaagcggttcatcaacgcacaaaggctgagttagaaacgcaaattctagcgcaagcaccgttaaaaaacttgttttttgcggttaaaatgactgggactttcaaagtcatgcatacgcgggccgtccaaacacaacaggaaccttatccgaatttgactgctgcaacccgagtgcaaccggagtttgaacaaacagacgtaacgggcacgttgattgggtattatgcaccagcgctttatcaaggcgcagctgttgcaggctatcacgtacacttcttaaacgatacgcacgactttggcggtcatattctagactataccgtggtcgatgctcaaatgacgctccaaccgtttgaaacgtttgaacagcacttcccaagtgataacgaagcttttttaaagagtgactttgacttacaacaagtcaatgccgatattgaagaagcagaacactaaacattcaaaaagcccacggattttttgtattttaagcatggtggttaattggaccgtacttgtggccgacttcaatcgggttagcgatggcgcggtgaacaaattgtttagcggtcttaatggcagcctcaattgtctgtcccttagcgatttcagcacagatgcaagctgaaagtgaatcgcccgtcccattaatatgggtggtttcaacgtaaggttctgatagccaaaattcttgtccatcggcaaggcaaacgtagtctgtaacgattgattgtccggcctcgtgatggcctttaatcatgacgttttttgcgtccattgccaatagtgcttggccagcagcttggaaatcagcaggtgtcttcagttcaataccagttaatttttgcgcttcgtagaaattaggcgttaggacagttgcaaggggcattaattctgtctttagtgtgttaaaagcatcatctgccaacaacaatgcttcatgcttggtaataatgaccggatctaacactaggggaccaaagtcatgttttttcaactgattagcaacggttagaatggtctcacggtcggttaacattcctgttttgcaagcgcgaacctgaaagtcggctgcaattgcttcaaactcggcatcaataaagtcgggagacagtgcttggctagcacgaatcccatatgaatttccagcaacacaggctgtcaaaatgctcataccataaacattacgggcaaaaaaagtatttaaatctgcttgcgcaccggcactgccatcagaatcggaaccggcaattgtcatgacttgcggaaagctatttaacattatcaacatctcttttccagagcggacggaacgtccatcacttaatatatcctaatattagtataagcttttaggtgtccttttttcaatcagcagaagacactaattaagtgaatttcgtgtatactatgaattaaataattgtcaggagggacttatgattcaattaaaaatcgaacgattatcttatcaggttgatcaacaagtgattttaaccgacattaatttaaccattgaaaaaggcagttacttaacgattacaggaccttctgggggtggtaagagtaccttgttacggttaattgcggacttactaacgccgacacgtggtaccattttattaaatgatcagccactgacccagtttagtcccaatcagtatcgacaaaaggtttcgtattgttttcaacaagcaacgttatttggtgaaacaatcggggataatttacgttttccatacgagatccgtaatttaccggtcgatatggcagcaattgaaaaagcgttggcagcggttgggttagccaacatgccactaacgaaaaaaattaccacgttatcgggcggtgaaaagcaacgaattgccttgattcgtaatgttttatttccaccggaagttttattacttgatgaaattacgactggtttagatgccgctaataaggcaattgtattggcgtttgtccagcacctcaatgaggattgcgggctcacaattattgccattacccacgatacagaagaattacaacggaaagggcgccaggtgcaaattgttgctggcgaattggtaaatcaagatgaacttagccgttaatggtctttcactgacgtttgctgtgacattagtgtttgtcgcattagtcattagcttccatgaaaaaatcggtcttgaaaaagatatgattatcagtgtttttcgcgcaatcattcaattatttatcgttggttatttactgaaattcatttttcatattaacgatgtgtggctaacgttattgatgatgctgatcattatttttaacgccgcagcaaatgccaaaaagcgggcggggaaactacgcaacgggtttccaatttcatttatcgcaattttaacaagtactggggtcacgttaggattacttgttttatctggggcgattaagtttattccatcgcaaattattccaattactgggatgattgcttccaactcgatggtcgccattggcttgagttaccgcagcttactggcgcaatttaaggatgaacggcaacctgttttggaacgactcgccttgggagcgaccgctaaacaagcatcaattgccattgttcgtgagagtattcgtacggggatgtcacccacgatcgattccgctaaaacgatggggcttgtcagcctgccagggatgatgtcgggcctgatttttgccggaattgatccagtcaaggccattatgtaccagatattagtgacctttatgttattatcggcaacgagtcttggttcagtgattgcgtgttacttagcttatcgatcattttacaatgaacgggaacaattgattgatctttaactgattgcacaaaaaaacgcccgttcggcgtttttttagttattgatgtttttgtttatagcgatagtacaggccaaatggcactaagttttcagtgccatttttaatgcgttgtagattttcgcggtgccggtagaccaggaaaagtaagaccaaggtcgcaatcgaaccgagtagccaatcatgcgtgtaaaacgataaaatcgcaatcatcaatggaccgaggatgctagccatgctaaccatacttgtaatcaggatgacactgataaagatggtactggcaattacgaagaaaagtggattgtatgccagtaagatgcctgcgctggttgcaacggcttttccccccgtaaagtgtaaaaagatggagtaagcatgaccgacaacggccgctaagccgacgattaagaccaatgcatgattggggatgtgaaaaatcatcggtaggctagcagcaagtgtgccttttaaaatatcaagaaataaaacggctgtcccagcgattgggccgagcacgcgatacgagttagttgtgccgatattatggcttccagcatctcggggatctttgtgacagaaaacgcggccgataataacgcctgatgggaacgaaccgatcaggtacgcaagaataaagataagactaagtttcatgacaaaaactcctatttgtggcatttgtttcccctattttagcattttgacaagggaaaaggaatattgtatgttagaataggtgaatacgaacatacatttgtattggcaagaaattttaaatttttgattgtaaaatcatccaaacttgttgataatataccttatctgttcatttttaaacaaaggagtcatacttgaatgccaaatcaaaaacaagattataatgataattcgattcaggtcttagaaggtctagaagcagttcgaaaacggcctggcatgtacattggctcaactgacggtcgcggcttgcaccatttggtgtacgaaattgtcgataacgctgtcgatgaagccttggctggttttggttcagaaatcaacgtcgtaattggcgcggataatagtattagtgtccgtgatcatggtcgtgggatgccgactgggatgcaccaatctgggattcctacgattgaagttattttgacagtgcttcacgcaggtgggaaatttacccaaaacagttataaaacatccggcggtttgcatggggttggcgcgagtgtcgtcaatgccttatccgaatggttgaccgtccgcgttgtgcgtgatggtgttgcctacgaagaacgctttgaaaatgggggccacccggttggtaccttgaaaaaagttggcaaagctaaagaaccaaacggcacgttaattacgtttaagccagatgggacaatttttcaaacgactacttataactacaataccttagcagaacgattacgcgaatctgcctttttactcaaagatgtcaagattacgttgaccgatttacgcgctgagccagcacgtcaagatgtcttccattacccagaagggattcaatcatttgtcgattatttgaacgaagataaagatacgattggtaataagttatatttcgaaggcaccaaagaagacattgaagtcgaatttgcgggtcaatataacgatggctactccgaaaacatcatgtcatttgtgaataatgtccggacaggtgatggtgggacccatgaagctgggatgaaagccggcttaaccaaagcttttaacgattacgcccgcaaggtaaacttgctcaaagaacgggataaaaacatggaaggctccgacgtacgtgaaggtcttagtgccgtcttgtctgtccggattccagaagaactcttgcaatttgaagggcaaaccaagggtaagctaggctcgccacaagcgcggacagctgtcgatagtttggtttatgaacaaatgagctttttcttacttgaaaatggtgaatttgcgcaagccttagtgcgtaaatcattaaaagcacgcgaagcacgtgaagctgcgcgtaaagcacgtgaacaaagtcgaaatggtaagaaaaagaagaaatccgatggcttattatctgggaagctaacaccagcgcaatcgaaaaatgcggcgaagaatgaattgtacttggtcgaaggggattctgctgggggttctgctaagcaagggcgcgatcggaaattccaagcgattttgccattgcggggcaaagttttaaatacccaaaaagcgaaattacaagaaattctaaaaaatgaagaaatcaacacgatgatttacacgattggggccggagtcggggctgaattcaaacttgaagacagcaattacgataaagtcatcatcatgaccgatgcggataccgatggggcccatattcaaattttgttgttaaccttcttctaccgctatatgcggccgttaattgaagccggaaaagtctacattgccttgccaccattgtataagctccaaaaaggtgctggggcaaaaacgaagattgcctatgcttggactgatgatgaattgaaagtcgtcgctaaagaaatgggtaaaggctacagtcaacaacgtttcaaagggttgggtgaaatgaatgctgatcaactttgggataccacaatggatccaacgagtcggacgttaattcgggtgcggattgatgatgcagccttagctgaacgccgcgtcacaacgttgatgggcgataaagttgaaccacgtcggaagtggattgaagaaaacgttaagttcacaatggctgaagatggtagcatcttagatacaacgaatggtcaaccagcaccgacaacttcaagcgctgaagtggatttatttgaccaattagacgaatagaaaagtgagtgattaaatttggctgatgaagcacaaaaaattcaagagctaacgcttgaagaagtcatgggcgaccgctttggccgctattcaaaatacatcattcaagagcgggcgttaccagatattcgcgatgggttaaaacccgttcaacggcgaattttatacgcaatgtccatcgatgggaatacttatgataaagggttccggaagtcagcgaagtctgtcgggaatgtcatggggaatttccatccgcatggggatagttcaatttatgaagcgatggtccggttaagtcaggactggaaattacgtgaaccactgattgaaatgcatgggaataatgggtcaatggatggggatccaccagcagcaatgcggtatactgaggcacgcttaagtaagattgctggtgaaatgctcaaggacatcgataaaaagacggttgatttcgttttaaacttcgatgataccgctgaagaacccactgttttaccagctcggttcccaaacctcttagtgaatggggcaactgggatttcagctgggtacgcgactgaaattccgccacataatttaggtgaagtgactgatggcttggtctatctattggatcatcccgatgcaacgttagaaaaaatgatgaccttcatcaaaggacctgatttcccaactggtgggatcttacaaggggtcgatgggattaagaaagcctatgaaactggtcgcggtcgagttgtcgtccgggcaaaaaccagcatccaacaattacgcggcaatcgggaacaaatcgtgattagcgaaattccttatgaagtcaacaaggctatgatggtcaagaagattgatgaattacgcgttttaaagaaggtcgatggaattgctgaagtacgagatgaaagtgatcggatgggcttatcagtcgttgttgaattgaaaaagcaagcggatagtcaagggatcttgaattatctgttcaaaaatacggatctgcaaatcacatataactttaatatggtcgccatctcgcatatgcaacctaaacaggttggcttattagaaatcctccatgcctacttggaacatcaagaagaagtcgtgattcggcggacaaaatataccttacaaaaggcattggatcgtcagcacattgtcgcagggctaatcaaggcgctctcgattttagatcaagtgattgcgacgattcgtggtagcaagaataaaaaagacgctaaagataatttagtggcaagctacgccttcacagaagcccaagctgaagcgattgtttcactgcaattataccggttaacgaataccgatgtgactgctttggaacaagaatcagctgaacttgatgcagcgattaaggaataccggatgattcttggtgatccaaaagcacttgcacgggtgattaaggcgcagttaaaagcaatggtcaaaacttatcggagtgaccgaaaaactgaaattgaagcacaaattgagacgcttgaaattgatacaagtgtgactgttgttgacgaaaccgtcatggttgcagttagccatgacggctacttgaaacgtagtagtttgcgctcgtatcaagcatctgaaggggccgacagcggtttgaaagacggcgattttgccattttacaaaagccactacaaaccttagatcaattgatgatgttcaccaattacggacatttaattcaacgaccagttcatgaaattgctgatttgaaatggaaggaaatgggcgaacatatttcgcaatcgattggtttggcggctgatgaagcgattattgcagcatttgcctttaagccaaatgaacaggctggctactttgtgattgggacggatgatggctatattaaacaaactgccttctctgacctcttgccaagtcgaacatatcgttctaaggcacaagactttattaagttgcatgcagatgctcatgtgacaaacgtgaactggattccaagtgatgaagggctagccgtctttagtgctagctataaaggttatggattgagttttaccttatctgaagtctctgtatcaggtgctaaggccagtggggtcaaattaatggatctcaaagatggggatgttgtcatcggctttacgttatatcatccagaagataaacatgcagccgttgccattgtgacgcaacggggcgcctttaaacggatgctcttaagtgaggttggtttaacaagtcgtgcgcgtcgtggggtcttaattctccgtgaattgaagaaagaaccacatcgggtagcagcaatggttagtgttgagcaggcaagcgagttactgattcatactgatcagcaagaagtgattgcaattaacccttatcaacatgcaactgccgaccgttattcgaacggtagttttgtgatggatgttgatgaagttggacaaccggcatttgttcaaacgactattccagttaaaaatgaagacgagtcaaaataataaaaaagcaagtcatctatgtgatgacttgcttttttctgttatacataatatgcggattttttggttttgtactataacagcaaaataagttttgcacaatttaaatggtggggttataaaaatattttaagtagataaatagctataaatcaatctttcaaaagagtttaagagtttctaaacaatcaaaaagaaagggcttgcataaactatgtgatgtgttatactaaaattgtgaaaactgtgataaacaacacttgactaatggaggtaatccacatggtaaaaaccgaaaaaattaacttagccgactattgggacggctttaacaaaggtgactggcaagatgaaattgatattcgtgatttcatccaacaaaactttactgcctatgacggtgatgaaagtttcttagctggtccaaccgaagcaacaacaacgttaaatgatcaactaatggaattgaagaaacaagaacgtgaagcaggtggcgttttagccgcagacaatgataatcctgcaacagttacgtcacacggccctggttatttaaacaaggatcttgaaaagattgttggattacaaactgatgccccattaaaacgcgcattcatgccatttggtgggattcggatggccgaagatgccttggaagcatacggctttaagactgatccagaacaacacaagatttttaacgaataccgcaagacacataatcaaggtgtttttgatgcttatacaccagacatgcgtaaagcacgtcactacaagattattacgggccttccagatgcctatgcacgtggtcggattattcctgacttaccacggattgcagtctatgggattgatcgtttagctgaagaaaaagtccgtgactttaatggtgttggcgacggtgaaatgacagacgatgtcattcgtcttcgtgaagaaatcaatgaacaatatcgtgctttacaagatatgaagaaaatggctgctagctatggctttgatatttcaagacctgctaagaatgcccaagaagcaattcaatggatttacttcggttacttagccgctattaagacacaaaacggggctgcgatgtcagttggccggattgatacaacgatggatatctttatccaacgtgatttagagcggggcttaattacagaagctgaagcgcaagaaatggttgaccattttgtcatgaagttacggatggttcgtttcattcggacagaagattataattcattattctcaggtgatccaatctgggcaacattatcaatgtgtgggattggtatggatggtcgtcatcatgtcactaagactgccttccgtgtcttgaagacattggaaaatatgggtgctgctccagaacctaatatcaccttactttggtcagatcgcttaccagaaggtttcaagcgctatgcaacagaagtttcaattaagagttcaacgattcaatacgaaaacgatgatttgatgcgtaatgaatgggggagtgactattatgggattgcatgctgtgtttctgcacaaccaattgcagacggcgttcaatattttggtgcgcgtgctaacttggctaagacaatcctttacgcaattaacggcgggatcgatgaattaggcaaagctcaagtcggcccagcttatcaaccaattacaagtgaaatcattgattacaaagaattcatgggtaaatacgataagatgttagattggttagcagacgtttacgttaatgctttaaacaccatccactacatgcatgataagtattactatgaatcagcacaattggcattgaagaatagtcgtttagaccggacatttgcgactggtatttctggtctatcacatgcggttgattcaatctcagcgattaaatacggccaagttaaagttatccgtgatgaagacggtatggcagtcgatttcgaagcgcaaaatccagactatccacgttatgggaacaatgacgaccgcgctgacgatatcgctaaatggttagtgaagactttctatacgaagatgaatacgcatcatttatatcgtggctcaaaattatcaacatctgttttaacaatcacatcaaatgttgtgtatggtaagaatactgggacaacaccaaatggtcgtcaagctggcgaaccattctcaccaggtgctaacccagcatacggtgctgaaaagaatggtgctttagcatcattactttcaactgcgaagattccataccgttatgcaactgatgggatttcaaatacgtttggtgtcacaccaaatacattagggcatgatgatgaagcacgtaaagacgcgcttgtgaacatggtcgatggttacatgattaatcaagggatgcatttaaatatcaacgtcttcaataagcaaaccttaatggatgcacaacaacatccagaagaatacccaacattaacggttcgggtttcaggttattgtgtctacttcgctgatttaacgaaggaacaacaagacgacgttatctcaagaacgttctttgacgaaatgtaatctaacgaaagtggatagcaatatccgctttctggtaaggtcgttaacgcgaattaacgactttaccagaaagcatagcttttcttttaagaggtgaaagtgaaatggcaattaaatttacaacacggttatcaactgaaaatgttgttccagaaaccccgataacaccagaggtgccaattggatatgttcattcgattgaaacatttggttcagtggatggtcccggaattcggtttgtcgcctttctacaaggctgtcgcatgcgttgcgaattctgtcataatccagatacgtggaatattggtagcggagaagcttataccgcagacgaattaatcgcaaaggcactgccatataaggccttctggggtaaagatggcggaattacctgtagcggtggtgaatccttaattcaaattgattttttaattgatttatttaaaaagtgtaaggcacaagggattaatacctgtttggatacttgtgggcagccgtttacgtataaagaacccttctttagtaaattcaaagaattgatgaaatataccgatctttcaatggtcgatattaagcatattgatccagcggggcacaaaaagttaaccggcttttctaacgaacatattttggaaatgattgaatatatgtcaaatcatggtcatcatatgtggattcggcacgtcttgattccagaacggacggattacgatgagtatctcactcgtctaggggattatattcaaacgttaaacaatgttgaccgagtcgaagtgttgccctaccatacgatgggaatcgtgaaatacgaaaagatggggattaaatatccgttagcggggattgaaccaccgacccacgatcgcgttgtcaatgcggagcgtctattgcatacagcagactatccaaagcagcaacgctaacataagaaaattttaagcctttaataagaatgagcaacgaaaggggttgctctttttttatatctttattattataatgataggcgtaaactaaagaacggagatttgaaaatgaaaacaagacaagaaaatatcttctcctctaaaacattaacctatttcctacagttagcggaaacgatgaattatacccaagcggcacaactactcggtatcacgcaacctgctttaacccaacagattaaaaaattagaacggatagtcggcgcgcctttattttattcagtcggcaagaagttacatatttcggatgctggtcggacgatgttggatgctacccatcagattcatgatttattaaatactgcgacggatgaaattcaaagttcaacgagtgcgacgcgcggtaagattaatattgggattttagcatcgatggaaatcagtgttatccaatccttcttaattcaatactataaacaatttcctgacatcgaagtcagcatgcacttattgactcggaaagaaatctgggaccgacttgaaaataataaaattgatattgccattatgtatttgccagatgacagcattaagaactggaaaccttataagtcacataagattgtggatgaacgcttactctttatcagccaagatcctgctttaaagacgcgtaagaagatccgttttaaagatacattagataataaatgggtgacatacccagatgaatactatttaaatcaattcatcagtgaagcctataagaatcaattggttgatcgtccagtgagtgcggctcaattcacatcaccatttgaaatcatgcgttttgctgaagcaactgaattaagtacagctttaccaaagagtttttatgaagcacataatttgggacttaagggaaacgcggttcaatttgatccggccattcagttcgaattagcttttgtcttccgcaaggaaaaggaagatattccacggattaatagctttttccgtgaattcgaccattatttagaagaaaaagattatttaacacggattagagagcaaaaccgtagaatcgtctaatatttttggtataattaggatgttatttttttaaaaggaaggtctgtataaatatgagtaaagaattagtattcggtcaccaaaacccagatacagacgcaattgttgcggcaatggcgtttgcttatcttcaacaacaactaggaaacgacgtagaagccgttgcgctaggtgaacctaatgaagaaacaagctatgcattgcgtcattttgcagcagcaacccctcgcatcattaaagaagcaagcagtgaagttgacagtgtgatgttggttgatcataacgaaagccaacaaagtgttgccgatatcaaagatttaacagtgacgcacgttgttgatcatcatcgaattgcaaacttcgaaacagtcagcccattattctaccgcgctgaaccagttggctgtaccagcacaattttattatcaatgttcaacgaaaacaaagttgaaattccagctcaattagctggtttaatgatgagtgctatcatttcagatacgttgttgatgaaatcacctacaacaactgaaaaagatcggattgcgattaagacattggctgaaattgctgatattgatttcgaatcatatggtcttgaaatgttaaaagcgggcactaacttagatgataagagcgaagctgaattaattgaagcggatgctaaaacattcgatatggctggtaaaaaagtgcgtatcgatcaagtgaatacagttgatatcgaagcggtcttcaaacgccaagctgcttttgaagctgctatcgaagcagacaacaaagctaatggttacgacttattcgtacttttgattactgacatcttaaacagtaactcagaagcgcttgttatcggtgaaccagcagaagcctttgaaaaagctttcaacgtaaaattgaacaaccatcgtgcacaattagccggtgttgtttcacgtaagaaacaagtggttccacaattaacagaagcattttaataacgattaataataaagtccttcggggctttatttttttattaggaggataggtaaatgaccgaggaaagcattgatgcaattcaagtgattgaagcgaccattcgaaattgccaaaagagtcagctgaagtttgtagcgggttcggctcaatttactttattaaaaaataggctttacgcattagaagttggtcgtgatttattgaacgggcacacagacataacagtcgaacccttagtcgaggcacaagccccgattgaatcgattattcataaaactgaaaaagcactctctaatcaaaaaaaaacatcacccgtgataaaacgaatgactctattattagcagcgatgactgccgtgcagactgctattataaaccaactatctgcaaaaaagacccctcattaatttgggggcttttttgtgtgccaccagattggaattattctaatctaactaaaaatgtgttataatgtaaatgaattcataagaaggagcgattgacgatgaaacataccatcaagtttgccttaacaattagtgtgggtgtgattgcgctatgcttggcgtttttgctacatgagccattgtgggcacagattttagtgagtttagcggggagcttagtagcgctctcgatgtttattgagatgattaaaacgctaaaatctggtcaatacggggtggatctattagcgattaccgctattattgcgacgttagcggtcggtgaatattgggcggcattaatggtcttggtcatgttaactggtggcgactcattggaagactatgcagcgcataaagcaggccgtgagttaaagacattacttgataattctccgcaaacagcgcatcgccttgttaatgatgcggtcgaagatgtttcagtcgataagcttcaagttggtgatcaagtgattattaaacctggcgaattggtccctgttgatgggcatattattgcaggaagtgctttattcgatgaatcatcgttaacgggtgaatcacgccccgttgaaaaagcactaaatgatgagctcatgtcaggctctgtgaacggcgatacgtcggttaccatgcaagttgaccaattagccgttaatagccaatatcaagcaattgtacggcttgtagagacctctgcggcacaaccagcgcattttgtgcgcttagctgatcgatatgccgtgccatttacattagttgcgtatgtgattgctggagtagcttggtggttatctaaggatccagtacggtttgcagaagtgcttgtcgtggcttcgccgtgcccattaatattggcagcgcctatcgcgttaatctcagggatgagtcgtgctagtcgaaacgggattattgtcaaggctggcacaacaattgaaaaattagcgtctgctaaatcagcagcgtttgataaaactggaacaattacgaatggtcaattgacggttgaccaagttgtgccagtgattggtatcgcaccaaccgatttattgcaattggcggctagtgcggagcaagaatcttcgcatattttagcacggtcacttgttaaagcggcacaggtagaacaattacaaccaattgaaacattaaaagaagcaacgggcgctggggtagttgcgacgctgtcgtctggacaaacggttcgtgttgggaaacatcaattcgtgacgccagatgcgcaacagcctctgcaagaacaaaccactgtttacgttgcgatcaatgatcaatatgcggggtacattacgtttatcgatcatttacgaccagaagcaccggccacgatgcagacgctccatcaactggggattacgcgtttgatgatgttgacaggcgatcaagcgacaactgcgcaccagattgcggaacaagtcggaattgatgacgtccatgcaggctgtctgccagtcgataagattcatttaattgaacaagtaccgcaagaccaacgcccactaattatggttggtgatggggtcaacgatgcaccgtcactggcaagtgctgatgtcgggattgcgatgggggcccatggcgcaacagccgcaagtgaatcagcggatgtggtgattctaaaagatgatttaggacgggttagtcgtgccgttcaaatcgcgcgtgacacgatgcgcgttgctcgccaggcggttttgattgggattgcaatctgtattgggttaatgttgattgccagcaccgggattgttccagcattagtgggggctttattccaagaggttgtcgatacagtttcaatcttatatgcattacgagctagaacggatcgttaagggaattaaaaagagccgtattaacaccattcaagtgttaatacggctctttttttgtttatttttcagattgtacgtgtaaaaccatgtcttttggtaaatataacttaggcaccatggctaaacaaatacatagaacgatgccggttagaatgaagctagcgataaagctgccaccgttaacagtgagcgagtatagccaagcattcatacctttgggagcgtatgagccccaataaacggcaccggctaagaagtggcagaagtattttgcaaaagtaccaaaaaatgcggccatccataaaagggtcatcgttttgacttttgtatgattttgaatacttgcttgaataggtcgttgtaagatacctgctaaaccaacaaccatgaaggcaatggtaaattctagcaatccttgccatacgttcaagacactaccgtttcctaatccacgtaagattaagtctagtagaccccagattaagccggagaccattccaggaatggcaccacggcgtaaactgtagattacaatagggataatcccaaaggagacttcgattgcggaaggccccactgtatgggggatgtattccaatgccacggcaaatgccgcgatgattgccccttcaatctgaatcaatagacgctgatgttgcataaaaataaccccttttcttgttcaaccaacacaaaaaaggagttatcatttcaactccatcacaattcctacgcttgtcttaacaaacaggttcgaagggtctgattaaaatcactctcagccaatggctcccctttgcgatggttaacatttaatttttaggaacgctttcagtatactcgatagctggtataagtcaagcaatgtgtaaatcgacgaattgatgtaaaccaaatgactgttagaacgacattgataatcgttgccaagaagagcactaatagtggctattcaagctggtccattgccgagcgttgttcatcagcaacgacgtgcgtatataagtgagtagcttgcgtggtcgtttggcctagttgggtcgcaacaattgtttcactatgagttgccgccatgagatcagtggcaagtgtatggcggaacttgtgtggtgtgagacgcacgccaaatgcttcagaatacttcgcgactaacttttcaatggcatagttgctcatacgcttggcgctgccacgatagcgactgacaaataaggcttgttcattatcttcttttagatagcgtgatttacgaatctggcagtaatcccttaaaaaaggtaaactccacggagcaattgggacagtatcttgctgtccgcctttacggatcacggtaattgtaagttgttcaagattcaaatcgttgatgttggcttgggccaactctgatagtcggatgcccgttgccagcgccagtacacagatggcaatatcgcgttcgcaattttgcttgtatgatgccagttggcgattagaaagcaagttagggtaatcaacttgcatgaaggtgatgaagtcgtgtttcttttcaccggtcagcagttgtttgctgatgtgtcgtgaacgtgtcgtcattgtttctgaagctttaagtagtttcaccttcttcatgacgtttcggtaaaaataaggctcaccatcagcttgttcggcttcaatggttaagaagtaccagagcgcatttaatgcgttaatcgagcggttaacggcttgaaaggagagcttatggttattttgtttacgcttattcattagaaaaatcttgtagagctcaatatcttcgagtttcattttttcgagtgcggtcagtggcatctggtcgatagaggggaccacgacgatctgttcatcaactaaccaggtgaaaaagcgaacgtattcttgtaagtattgatagagcgttgcagaagagtaggcgtttgcctggcggttaatgtagaatttacgaatgtaatccggaagattggcgagttgcttttcgcagagttctaagtaacgttgttgatccatgatggaagactccttaattagcagtttaaagatagtttagcaaaaatgaggtgagaatactacaagtgttgttaaaaccataattttaacaacacttgtattgcaaaccgttccgcgaactgatgatcagatggtcttattcgactatctgcacagcaacctaaagatccttattccgtttaaaagctggtatatcaacgtttaaggccttttttaacgatttgatatgtgagttttaaggctaagatgtgttaatatgcgtatttaccaattaaaatctggcataatcgtcagattaatcacggatttgtgcctgagcttagatgaattctgcatttaaagttaagtttggcgatatcggttggccagtcagtttgattcatcatattggcgttgagtaacttgtaatagtttatgaatcgtgcagtgtaaaaaacaaacgcgttaagtgcggttcatcaaatcaattgaatgatgttggataataagtggttattttagcgctctttcaagggataagcgtttcttcgcataatatatattatgtaaactaaaatagatttaaaaaattaactaagcctacccactcgtcaccagcgtttaagcgcagcaaaaaagcgccatattaaaatgacgcttctgtaattagtgatttaaaaactgagccaacaaagctgcaaaatcatttggattttggaataacgccatatgaccagcatctgggtaaagttttaattgggaatttaaaatccgttcatgtaattcatatgaaccattaacaggtaccattcgatcgtgatcgccgttgacaatcaatgttggttggttaatttgtgccaggtttgccggttgatcgtgcgcatactgtttaattgctattaattgacgacgataagcggctaacgtaatggctttatcttcaacaatttcacgctgttttaaccggttaatgaacgctttaccagcctgtttgccttggggcgttctggtgaagaagaggtattccttaacgtctctatgcgttaagaaggaccgaattaagtcaaaagttgttatgcgccccactttggcgatttctgagtcaccctggggacctgttccgactaaaattaagtgattaacgcttgaggggtattttaaagtgaaggcctgtgcaacaaaaccacccatcgataatccaagtaaatcgaattgagtgagctgcatagctgttataaaagcataacaatcagctaccatttgctcaatcgtcgtggggactttgccatccgagaaaccaacaccacgattattaaagacaatcacgcgtcgttgctgactgatcaggtcaattaatgcagggtcccagttgtctaaagtggctgataagtgattcaataaaacaagtggtaagccgcgaccagtacccacttcgcggtaagcaaaccattggccttgttgatcttgaataaattggttgggggttgttagataagtcatcttgattagcccgcttgaaccttgatcaccactttaccagttggatggccgtgagcaacaagttctagtgcctctttaacgtgtgctaaatcgaattgatgcggatcgatggctggtacaatcgcttgttgttcaacaatttcagtgatttttttgagttgggcaccatctgaacgaacgaaaataaagcgatattcaacgcccgcttttttagcgaggcgatcccatttccgcccggccaacgagaataagagttgcttccaaaatggtaattgcaattgtttagcgaattgtttgtttggaccggcaatcaagcttaaaatccgcccgcccggcttcataatcgccatttcacgttcaatatctgctccaccacgtgtatcaatcacgtaatcgatttgatctaaaacttcccagtaatcggttgttttgtaatcgatatattggtcagcacccaaattcaaaatgtgatctcgcgcggctacattgcctgaaacaatcacggttaagcctagtgattttgcgattgggacggctattggaccgaaaccgcctgaaccaccagggataaacagcgttcggttcggttgggctgccaattcctcaaatagcccctgataagccgttaagccagtcagtgggattgcaacggcttcacgtagcgataaatcctttggcgtgtaccagattgcatcggtggtaaccgcgacatattcagcaaagccaccgattttagccaatggtaaacgcgcatagacttgatccccgactttgaaatcagtgacgtctgttccaatcgctgtgatttcaccggcaatttcattgcctaaagtcagtggtaaagcatagttttgcattaatttagtatcgccgcggatattcattggatccaatggattcaccgctgcataggcgactttgacgagtacttcattggctagcggttgtgggcgatcaatttcttgaatcgtgacagctagtgtttgattatattttttaatttgagctgctttcatattagaaaacctctttccacgggagtgtttgtagggtttgttgcacaattgctgttagcgtagttgaatctgggttcactttagccatgacccggataccaatgagcgcactttgaagcgatgcagctaaaagatcaattgcaacagacggttctagttcggcctggccggcaatcagtaatgcctgcaacagtgctttttcttgggttaaataatgctgaatcagcgtttggatgtctggttctaatgaatttaacgttgccgcggtattcaccactaagcagccggctggttggttatccggatggtcaataaatatttcaaaaatggctgttaagcgcgaccttaaatcggtatgtgttgccagtacttgctcgaaacgctcgttaatttggtcacgataatgtgctagtacttggataaacagttcatgtttatcgccgaatgtatcgtaaatactgcgccggtgaatccccattgcatcaactaggttttgcattgaggtattctcatagccttgttgccaaaagacaagcatggctttgtctaagacaaccggtgcttcaaatgtttttgtccgcatctggatgatcctctcttattagaacgttcattctaatataaacgattctttgaaataacgcaactatattttgcacaattttaaggggcaataaaaaagaacgcctcgaatgagacgttcttgtcagctgttattttgtccgatagaaaataccaaacgcccctaggccaacgtgactcataatgaccgggctagttagtgcgactgtataaggcacatggggctgtgtttcttcaagcgttgcttggatcttagcggatagttcatccgtgattccgacgtgtgagatgccgatttccgcaacgtcttgggtggctaagtattcacggatattgttgatttcttttgtaaaagcttttagtccccgcccctttgcgacgacttctaattccgtatctgttaagcgcacaattaccttgagtttaatgattttcgttaatagcccggccattctactaattcgaccaccgcgttgaagcgcgtcaagtgaatctaaaaagacgtaggtttcggttttacgacggatgtcatcgagatgcgcgataatatcatcaagaggcttccctgcttcaacgtcttgggcggcagcaaccacttgataagcaagtccacggtcgattgctttactatcaatcacgtgtacgtcacttgttgattggtgggctgctgtgtgtgccccttcgattgtgccacttaacaagccggtacaatgaatcgatagaatcgtactaccatcagcccctaattgatcatataaatcgacgaaactgccgacagttggctgacttgttgttggaaaatcggtcgttgcattttgtaagcgacttaaaaattcagcgcgggtaatggtttgtccatcaatgaaagactcatttccttgttgaatcgttaaggggacgatgtgaatgtcatatttggcgcgttcgtctgctgtcagttgaatcgatgagtccgttacaattttaattgtcatatgagttgtactccttcaagttaaatgttgaggtaaattgaaaaaaacatcagggtcgttccgagcattacgaaaaagtgccaaatcaaatgtaagccaggaattttaggaaaactataaattagagcgccaacggtaaagactacgccaccactgactaacagccaaaaaccaactggactgaggttgacataaagggtcttaccagctaataaacataaccaccccatcacaacgtaaatcgttgtttcaatcttttggtaccgaccgtggctcaaaatgtgcgttataataccggcaatcgctagtgtccagattgcaatcagtaagctaattcctgttgcatggccaataaaaatcaaacaatatggcgtgtaggtaccagcaatcagcaagaaaatattgctatggtcgaatatttgaaacacgcgcttggccttggtaaatgctaagcagtgaaataaagtcgaagcgagatacagtagcagtaatgtggcgccatacactgctagactagcaatcgcgactggtgagagtgttttatgaatgcttttgaccaggagcatgatgactaacgttaaactaccgaaaaaaccaatcccgtgggtaatggcattccatatttcataaatcagttgttgtcgtttaatcgtggaaagttgcatggttctcgcctctttttctctatttgccgagtattatagcgcgaatgtagattataagtcaatagataatagaattcgattctatgttagtgacaaatgataattgctatggcataataaatatactatcaacagattggtggcgttaatcagtatgcaatcacaagaatttgaaaaatggttgggtgactttcaacaattgcggttaccattatggtctgaatttccagatttagacctctatatggaccaagtcattagtgaggtcaataaacgactgagtcctttgttggacgttaaaataacgaaaacaatgattaatagctatgtcaaaatggcgattattgaacgaccggaaaagaaacgctataatcgggatcatttagccgaattgattgtggtcagtattatgaaattagtcttcccgctcgatgtcattaaacaagggatttcgcaatcgttggcaaacgacaccgctggtaaggcatatgatcagtttgtgcggttatttaatgccgaaattgcgaatattaacgcgcaatcaacggttaatgaattcaatttaaacgaggaaccgctcaacattgttcaaaaagtagccgttaaatccgttatttataagctaattgggacgaagttggttaccttagaagaacccatttctatcttataagtcacaaaaaaagcctgtcgaattgttcgacaggcttttaaattaggctttatcaaaatctttaatccaagcaagtgcaatggctttttcaccaagatgggtcccgataactgggccaaagtagctgatatcaattggtaagtctggatagtttgcttgaagcttatcacgccatgcaatcgctgctggttcatcgttagcgtgaatgattagtgcgcgtaatggatagtcaacacgttcggctgtttcagcaaaaatttgttcagcgcgggcgtaagccttcttcaatgaacgaaccttctcaaatgccgtaattttgttagtgtcagcgtcaaacgttaaaagcggtttaatcttcaacatgctaccaataaaagcagatgcgtttgataaacgaccaccacgcactaagttttgtaagtcgttaacaatgaaacattcatccattgtgctttttagatcgtcaaggcgtgcgataatctggtcgacggtcacttctgggtcgcgtgccattctggccgcttccattgctaagtagcccattaacatcacagtaatccctgaatcgtatgggacaacctggatgttatcgatggtgcttgccgcatttttcaatgtcgtgacaaacccagagatggtactagcaaggtggatgctgatgacagcatcatacccttcgttgccgaggtcttcgtatagttttaacatttcacccagtggtggttgtgatgtactggggaatgtttcggatgtttttaatttttgatagaactcttcagtggttatatcaacgccttcatcatagacctggccatcaaggataaccggaataggtacgacgaagagatgatggtctttcacttgctgttctgtgagataagcggtactatcagtgactacagcaattttcatggtgacacctacttttttattattcggtaataactatatcataaatggtaggttaattcccctaaaaatgccgattttccgaaaaatgtatagggcgtctcattttaatggtcgattaaagctttgataataacggttcagtaggatttttaaaagttgctgttcatcggtactccagttttgttgaatgtgattttcgagttcagtttgaagttgttgcaacgtacttaatgccgttttggcggtcggtgttaatgcgtaaacgcgttggcgcggatcagccccggtcacttttgttaacagcccttcttgagccatcgtatttaactgccgactgagtgtcgatgcatcgagtttggttaacgtggttaattctgcgtgcgaaatgcgttcttgatcgggttcaatggccattagaatattgacttgggctaacttcaagtcgagtcgtagcgcccagtgtttcttttgttcttgatacaatagattcagttgattaaacgttgctaaggttgagcgcacggtaaatccccctttaattgtataaagcaatttgataattgtattatacaatagtcgtgttagcgattgcaaacaactaatttctttgaggttccactgcaaaaccgttacaataagtaagacaattcaattatagagagtgtgagcaataatgacctttgatggtttaatgacccacgccgttgtaaatgagctaaatacaactttagcagacggcaaaattacgaaaattcaacaaccttatccaaacgaagtaatcttaacgattcgggcaaatcgtaagacctatccccttctcctatcagcccacccatcttatgcgcgagtgcaagtgacgcgggtgccttatgcaaaccccgcaacgccaccgaacttcgcgatgtctttacggaagtatttagatggcgccattttagaaaacatcaagcaaattgaaagtgatcggattctaagattcacatttaaatcacggaatgaactgggggacttacaacaactatgcttaatcgttgaattgatgggccgccatagtaatgtgattttgattaatcaagcgaccaataagattctcgatttaatccggcacgtcggtgtttcgcaaaaccgttatcggttcttaatgcctggtgccgattatgttagtccaccggctgcaaccggggttgatggttttacgactgatttaaagacgcttgattggttaagttattataacgaagctgctgatgaacaagtcaaatggttacaacaacacttccaagggatgagtcgtgaaagtgccgttgaactacaaacccgtttaatggatcatgacaattatttggcggttgtgactgatttcttcaagcaattcgaccaagtgacaccaacgttaacagttggtgaaaagaagtcgtggttcacggccttcccttatgagagcctgacagggacactgagccattttgacacgttgagtgagctgttagaccaatattacttacacaaggcgcagcgtgaccgagtgcagcaacaaggtggtgcgctcatccacttcatccgcaacgagattcaaaaggatgaaaagaaactgaaaaaactacaaaaaacgttaaaagcagccgacagtgctgatgattaccggattaagggtgaaattttgaccacctatttgcgggaagtcgaacgtggcatgactgaagtcacgttgcccaatttctacgacaataacgaaccgcttaagattaccttgtcgaaccagattagcccttcaaaaaatgcgcagaagtatttctcgaaatatcagaagctccggaattcaattgcctacgtcaatgaacaaatggcaaagaccgaagcagaacttgcctacttcaacacgattatggcgcaaattgaaattgctgaacccaaagatttagaggatatcaaagctgaattacaggctgaaggttatttaaaggctaagaaaaccggtgccaagaagcagaaacgttacaagattagtgaacctgaagttttctatgcgagtgatggtacccggattttcgttggcaagaataactatcaaaatgatcaattaaccttgaaaaaagcccataaaactgatatctggttgcatgtgaagaacattcccgggtctcatgtgattattgatagcccagatccatcagaagatacgcttcaagaagccggcaacttagcggcctacttctcgaaggcgcgcttatcagcggccgtgccagttgattatattcaggttaagaagattaaaaaaccgaacggtgcgcgaccagggtttgtgatttacgaagggcaacaaacactttatacgacaccagacgagcaactcgttcaaaagctacgtaacaaacctgtgcaagactaataaaaagcgttactccaaagtgaattggggtaacgcttctttgattggtgcggctgatggcacacgctaaacgtgttctgcaagccattactttccggttaacactctattctaatgggcgtctgaccatgcttgtgggtcttggcgccattcattgagtgatgtagcttgttctggagttaagttatcagcggcttcttcgaccgctaataaggcggagaaattcgataaggtcgttagtggtaagttagcagttgcgaaattctgttggccggctgctagttcgtatgaaaagatgccaaaaataccaaggacttctgcgccctctttttgagcggcggccgctgcttgtaagacactcccgccggttgaaattaaatcgtcaatgaggactaatttttgaccggctttaaacggtccttcgatttgacggccttgaccgtgatttttcggtttcgaccgaatgtaaaccatcggtaagtcgagttcggctgcgacccatgcagcatggggaatccccgcggttgctgttccgccgatgacttcaacgtctgggaattgcgctttgattgccgcagctaagttgctggcaatgagcttgcggactttgggataaccaatcgttaaacggttatcgcaatagatgggacttcttagcccactcgcccaagtaaaagggttgttaggactgagactgacggcatgaatatcgagtaaggcttgtgcgacttggtgtgcaattgttgtcatttgaaagactcccattctgatttgatagcttggtaagcttgatatggatttgtagcttgcgtaattgggcgcccaacgacaatcgccgagctctcagcttgtgcggcttcgtgtggtgttacagcccgtttttgatcattggtttggcttgttgctggccgaatcccaggtgtgacgcagagaaaatcagcattggtgtgttcgcgaatcgttggcacctcttgagcagaacagaccacgccatcgcaatccgagttctgtgcgagttgcgcatagtgtgcgacagattctggtaggctgacattaacgagttgttcggtttgcatttgcgcttcgctggtcgacgtaagctgcgtaatcgctagtagtttagcgggccgcacgttgccaagtgcggcgccttttttcagaccagccgcccctgctttgagcattgcctgcccaccagctgcgtgaatcgttgtgtaatcgacaccgagttggccgataacagtcatcgcgctttgaacggtgtttggaatgtcatagagttttaggtcgagaaaaatccgatagccgcgcgcttttaacgttttaatcagctgtggtccctcttggtaaaaaagttccatgccgactttaacgaataaggattcatcagttggaaattgcactaaaaaacgatctgttgtttcccagtttggaaagtcgagcgcgataattaaagggttagtcatgagtgccctcctgtggtagaccgaatgattttaaatcggttagttgatatttagcgagttcatctggtaatgcggcgattagttttggacaggcaaatggatcgctgaaattagcagtgccgactgcgatggcattggcgccggcggccattaattcaagtgcatccgcagctgttgagacaccgcccattccaataatcggtaatttcgaaattgaacggacttgatgaatgagccggatggcaacgggttttatcgctggtccagataagccgcctgtttgattagcgagaattggttggcgtgtttttggatcaatccgcatccccaccagtgtattgattaatgagaagccggctgcccccgctgcttcaactgcttgcgcaatcggacgaatatccgtcacgtttggtgagagcttcacgtaaaccggcacttggctgactgcaacacaggccttcgtcaacgtggcagcggcttctggtgatgtgccaaattcaagaccgccatgggccacgtttgggcacgagatattcagttcgatggcatggacgttgggcgcttggctgatttgttcacagacagcgacgtaatcagcttcggtattgccggcgacattggagatgattggtaactcgggataatgctcggctaaccagggtaatttttcttgcataatgacttcaatcccgggattttgtaagccaatcgcgttcaacatcccacttggggtttcagcaacccgtggtgtcgcattgccaagtcggggttctttcgttgccgctttgataataattgcgccaagttcgttgaggtcataatagcgaccgtattcctgaccgaagccaaaacacccggaggcgggcataatcggattttttaaagctaagcctggtaaagttactgctaagtctgtcattaaatgagcacctcgtttgttttgaagacgggtccgtcatcgcaaattttgagctgaatgcttggatcacgtttgagtttggtgacacaggcgtagcaggcaccaatcccacaagccatccgttcttccaatgagatataggcattgggatgctcactgaatcgattatcgacggccattaacaagccttttggtccgcatgcgtaaatggcatcatatcgggttgtcgcatcagcaaactgtgcatcgagtaataaaccaacatggccttggtagccgtacgagccatcatttgtcgcataagcgactggcccgagcttgcgaaagtgatcttcatagaaaatggctgctttagttgcaaagccgaacacgtgttgaacgtgaacgccttttgcattaagttgccgtgagagttcatgtaatggtggaatcccagtcccgccaccaatgattagcgcgttttgtccggctactaattggtcaattggataaccgttaccaagaggccctaagacggacaagcttgtgcccaccggtgattcacttaagatcgtggtgccttcaccaacaacgcggtataacaaggtaatcgtgttagtttggcggtcgacattggcaatcccaaatggccgacgtaataaaagggcgtcactggggattttgatatcgacaaattgtcccggtgcaatgggttgctgtgcgaggtctccggtgaggcataattcatagatactgggggcaatttcggtttgcttagtgagggttaattggtattctaatggcaacatttagcagactccttctgatttttatgtaataaaagagccttaggcaaagggcttcagactcttttagtggttttaaagtggtttggtcaggagcgattgagattctaggaccgctaagatcgcatcagcggtatccaatgaggtcatcaatggaatgccgtgttcaatggcggtttggcgaatgacgatgctgtctttagcgacttgtggggcttcgttcaagccggttgtgttgatgaccagttgaatgtggccggctttgattttatcaagtaaatcgccgctcgtagcattaatcttggcaacggattgcactggcacacctgctgcttggaattcttgactagtcccaggcgtggcaatgatttgatagccaacttcgcggaagcgttttgctaattcgagcgcttgtgtcttatcttggttagtaattgtcattaagacgttcccgtgacttggtaagtgcatcccactagcttcgaacgctttatagagtgctttttgcatcgttacgtcagttcccatgacttccccggtcgatttcatttctggcccgagtaagctatcaacccgcgtgagtttcgagaatgagaagacaggtgctttaatatgaattagtgggcccgctggtaatagaccggttgggctctttaattcagctagtgtgctgcctaaaatgacttgggtggccagttgcgccatcgagatgccggtgactttactcaagaatggaacggtccgactagcccgtggattgacttcaatcacgtagactgcttcattttggataatgaattggatgtttaacaagccgcgacattcaagtgctaaacagagcttggtcgtgtaagtgatgatggcttgtttttccgcatccgtcagattttgtggtggataaaccgccattgaatcgcccgaatgaacaccagcgcgttcgatatgttccataattcccggaattaagacatctttgccgtcacagatggcatcgacttcgcattctttgcccattaagtagcggtcaattaggaccggttggtcgactgaaactttaacggcctctttcatgtaatgtgtaaggtcttctgcagtatgaacgatttccattgcccgcccgcctaaaacgaaactaggtcggattaagaccggataaccaatctcttcagcaatcttcaacgcatctggcgtattggttgcggttgccccgactggttgtggaatgtcgagttcggcgattaattgatcgaattggtcacggtcttcagcgcggtttaagttcgcgacgcttgtcccgagaatctgcacaccattttcggtcagtggttcggcaaggttgatggctgtttgccccccgaattgcacaatcaccccttctggtttttcgagttcaacgacattgaggacatcttctagtgtcagtggttcgaagtacaatttatctgaaattgaaaagtcagtcgaaactgtttctggattactgttcatgataattgcttcgtagcccgccttttggatggcttgcacacagtggacggttgcataatcgaattcaaccccctgcccaatccgaattggaccggaaccaatcactaagattgaaggctttgtgctgacaatgctttcgttttcttgttcgtaagtcgcgtagtaataaggtgtttgtgattcgaattcggctgcacaagtatcgaccatcttataaactggctgaatgccactttcttggcgcatttggcggacttgggcaggcatgatttgccaagttgcggcaattttagcgtcggcaaagccatttttcttggcgagttcgagtaattctaagtcacctttatcggtccggagttgttcttcaatttcaacaatgtggctgagtttatccaggaagaaaagatcaatttttgtcaattcactaagttcttgaattgaataaccgcggcgcaatgcttcggcaaggtagaaaagtcggtcgtcttggggatgtacaatccgttggacaaggtcgttatcaccgactgccgtcaatgctggaatttcgagatggtcagtgccaatttcaagtgagcgaacggctttgagtaatgcttcttcaatgttgcgtccaatggccatcacttcaccggtggccttcatttgggtgccgagttgccgatcacctttgttgaatttatcaaatggccaacggggaatcttcgcaacgacgtaatcgagcatcggttcaaattgcgcataggttgtcccggtgattggattatgaatttcatcaagtgttaaaccgatggcgattttagccgccatttttgcaattggatagccagttgctttagaagcaagggctgatgaacgactcacccgtggattgacttcgataatgtagtagcggtcgctattaggatcaagggcgagttgaacgttacagcccccttcaatcttcaaggcgcgaatgattttaagtgcggcatcgcgcaatgcttggacttcacggtcacttaaggtttgaacgggtgcaaatacgatggaatcgccagtatgaatcccgactgggtcgaagttttccatgttgcagacgactagcgcgttgtcatttttgtcgcgcatgacttcgaattcgatttccttgaaaccggcaatactttgttcaacgaggacttgtccgactggagataggctaagcccgtttttgacaattgtgctcagttcaccggcattttcggcaatcccgccaccagtgccaccaagggtaaaggctggacggataatgaccggatatccgttttcgttaacgaatgtttgggcttcaacgagtgaatgggcaatcgcagattctggaatcggttcgtttaactgattcatcaagtttttaaacagttcgcggtcttcagcttgatcaatcgcgctgagcttggtaccgagcaattcaatgttcagctcggcgagaatcccgttgtttgccagttccaaagccatatttaagccggtttggccgccgagggttggtaagatggcatctgggagttctttgcgtagaatttgcgtgacaaagtcaatcgtgatcggttcgatataaaccgtatcagcaacggctttatcagtcatgattgtcgcaggatttgagttaattaaaacgacttggtagccttcttctttaagcgctaagcaggcttgagtgcctgagtaatcaaactcggcggcttgaccaattacgattgggccagagccaatcactaaaattttatgaatatcggtacgttttggcatcactaaatcccctttttactatttttggcggcgattgaagtcatcgatcatgtcgataaattcatcgaatagatgtgcagcgtcgtgtggaccaggggctgcgtctggatggaattgaacggaaaaggccggatattgtctatgacggagaccttcgactgtttgatcgttaatttcaacgtgtgtaatcagaaggttttgtgggtcgatggagtcggcatccacggcgtacccatgattttgagatgtgaagtcgatccgtttggtggcaacttctcggaccggatggttgaaaccacggtggccgaacttcatcttgtaggttttagccccattggcgagggcaaaaagttggtgaccgagacaaatcccgaaaatcggcactttaccttgaatccctttgatcatttcaatggcttctggcacatcttctggatcaccagggccgttggttaacatgacgccgtctggatcgagactcagaatttcttcagctgttgtgttgtatggtaagacagtgatgttacagtcgcgttttgacagttcacgaaggatactatgttttaagccaaagtcaatcacgacgatgttccgcccgttagcaggactcggataaggtttggccgttgaaacttgttggacttggttttttggtaagaccaatgccttgagttgatcgaacgcgtgatcgtctgcggcatcaacgatgctggctttcatggtccctttatcgcgcagacggcgagtgagtgcccgcgtatcgatgccggcaatcccaggaattttcttttgctttaaaaagtcatcaagactcatattcatccgccagttatttgctaggcgtggtgtttcatggacgacaacccctttacaggttggtttaatcgattcaaagtcgtcgcggttgaccccgtaattaccgattaaagggtatgtaaaagcgatgatttggccgttgtatgattgatcagtaatggtttcttggtacccactcatcccggtgttaaagacgatttcgcctgtcgagataattggggcgccaaaaccggtgccggggaagatggtgccatcttctaaaataaggtaacgtttcatcttttagttcactccttttttgaacgtgctttcatcaacaacttcttgtcctttacgacacttgtcaaatcggtgtctgcaacaccaatccgccaagtcaggtaaatgctcagaagttacccgttgatgacacactccttttgatatgcaatctgaccagcaaccaaggttaataaagtatcaccttgcactgcttcgccgataaatggcgtgttgtggcctttcgataagaaagtgtttgcgtcgattgtggtggtatccgttaaattaaaaacagcaaggtcagctggttggccaaccgctaactggccggcgtgtggtaagttgaaaacatgggccgggttggttgttagccagcttgtcagttgcgcgagactaaatggaccgttggcaactaaatgcgtgtatagcaagctaaaggctgtttcactccctactataccaaatggcgctttcaataacgcctgttgtttctcttctgtggtatgcggtgcgtgatcggtcgcaataatatcaatcgtcccatccattaagcccgcccagagtgcttggcgatctgcaagtgttcgaagtggcggattcattttgagcattgcgttgtcactggtaatcgctgaatcatcgagtaacaaatgatgtggggtgacttcgcaagtgacgttgaggccatcttgttttgcgcggcgaacgagattgacggtttccttagttgagatgtggcagatatgataatgaacgccggtcgcccgcgctagctcgatatcccgggcgacttgggcggattcactgacactcgcaattccgggaacgcctagttttttagcggcttgaccgtcgtgaatgacgccgccattgacgagtgattcatcttcgacgtgcgcgacgatgggcatgttaatctgggcggccatctgcatcgcttggtacattgtttgtgccgtttgtaccccatgaccatcgttggtaaagcctgctgcaccagctgccttaaacgccgacatgtcgacaattgtttgttcagttaactcattggtaatcggtgcaaattgatatgtgtggacgctggtttctgcctgattgcgtgcaaccagtgtcttgaaatctagcaagttatcaggtacgggctttaagttcggcattgcaattacgctagtaaaaccaccgtgggcaaccgctgcgctccctgttttgagtgtttcttttgtcgtgaagcctggatctctgaagtggacgtgtccgtcgattaagccggcactgacgaaatggccgtgtgcgtcataaatcgtttctgggtcggttgggactgcggtaatcgttggttcaattgccgtaatctgaccggttgcatcgatggcgatgtcgcgtttttgcagttggccgtcaatcaagacttggccgtttttgatcaattgatacatagcagatccccctcttaatgttgaatcagatgttgttggtctaataggtgttcaatgatggccatccgcataaaaacgccgttggtcatttgtttaaaaattcgcgattgtggggcttcaacgagttcgtcggcaatttcaacgtcacgattgacgggtgctgggtgcaaccagatagcactggacttaaggtgtgctgcccgctcagttgtcaaaccgtactgagtatggaatgcagtgtcagataaggtttcatcggcagcaaagcgttcgtgttgaatccggagtaacatgacgacgtcaacttctggtaagacgtcatcgagttgggctggttgtccgtattgggcaaattcaggggcgaaccattcctcagggccggcaaaatacaatgttgcgccgagttgtttgagcagttgcatatttgaccgtgccacccgggaatgacgcaagtcaccacagatgacgacttttaagcctacaaagtggccgaactcttcgtgaatcgtcattaaatcgagtaagcattgggatgggtgttgcccactcccatcgcccgcattggccagtgccatgtggaattgatcatctgcgagtaaggcgtcgtaataattattctgagaatggcggacagcaacgaaatcgacgccaatggcttgtaccgttttgagcgtatcgctgagggtctcgcctttggaagtcgaactcgtatcggcattgaagtctaagacggtcatgccgagtttgcgttctgccatttcgaaactcgtatgggtccgtgtgctattttcaaagaataggttcattgcgtagaccggccgagttaatttgcttgtcgcgccctttttaaaggcgctagcgcggttgatgagacctgcgactaaatcattggtgagttgatcaacggaaaccaacgcgttatgcttttgcattttgttgagcctccaattcaagttcgctctttgctttatccggtaaaacaaggtttaagacaatcccaaggacggtggcgatggctagccctgagaattggtattggcctaattgtaagtaggcattgccaatcccgatgacgaggattgatgaaccaatcattaagttgcgtttcttatcaaaatcgacttgtttgtcgattaagacgcgcaaaccgcttgaggcgatgaccccgaagagtaagaagctaatcccaccaattacgggtgtggggatgctttgaatcaactcgctcagtttgccgatgaagccgaagatcatggcgaagaatgcggcgccacctaagacccagacactgtggactttggtgatggcgaggacaccgatgttttcaccataacttgtgacgggcggtcctccgacaaaagcggcgatgattgaggctgtcccgtccccggctaacgtgcggtgaagaccaggatctttaaagaagttacgcttggtgagtttgtttaagaccataatgtggcccatgtgttcggtcattgtgacaaaggcaattggtgccatgctgagaatcgcgccccagtacagaccgggtttgtaagtgacaaatgggacttggaagtctggtactttaaaccaaggggcgtccatcacgggttgaaaatcgacgatcccgaacaagacggcgatgatgtagccagcaatgatgccgagcaagatggggactaagctcatgaatcctttgagatacatattaaagccgatggtgattaacaacgttagtaaagcgactgcgaagaattttaagtcgtaattcccgtgggcattgatagtggcttgtttggcagctgtgccagcgagtgataagccaatcaccatcacgattgggccgacaacaatgggtggtaaggctttgtcgatccagtcggaaccaatcagactgactaagattgaaacgattaagtagactgccccaaccgccattgtcccttgtgcaatcccaggatagccagtcgttttcattaaagcgagcattggcacgatgaatgagaaactcgaccccatgtatgctggaatcttgcctttggtaatcaagaggtacattaaagtgccgaccccggaactgaataacgcaatccctgggtttaaaccgactaagattggcactaggacggttgagccaaacattgcaaacatatgttgaatggataaaccaatccatttaccggtgctgggtcgttcgttgacgtctaagaccgcatcgggatttctaaattgtgtagccataagtatttcctccatgtcgacgactttttgaaccaaaaaaagacacacgctccaacagattggtaggtgtgtcccttgacggacttaggcccctttttttaggcgcactaagttcaagacaaacccttttgctctctctggagacaattaaacggttcagtcgttatttagttagtttttcgatggtaatcccatcatgttgatcaatttcttccatcgcaacgctaatttgttcgttgagcgcggttggaatatttttaccgacaaaatcggggcgaattggtaattcacgatgaccacgatcgactaagacagccaatgaaattttatttggccggcctaagtccattaaggcgtcaagcgcggcccgaatcgtccgccctgtgtaaagcacatcgtcgattaagatgacatgcttatttgtgatatcaacgggaatatcgctcccgttaatctgtggttcattttgtgtatcaagatcatgttgatcatcgcggtataacgtaatgtctagtgtaccgacgggcaatgcgatgccttctaattgttcgaggcgttctgcaatccgttgggcaataaacacgccacgggttttaatgccgacgaggacgagatctgaaatccccttattctgttcgataatttcgtacgtaatccgagtaaagacccgtttcattgtgttactgtcgaccacttctttgaccatcgtaaagactccttccaaacaaaaaacctctcaaaccgataaggtcgagaggttacagttagagactccgcgtctagtggtgctttcaccgtaccttctcggcctcacgggaccgattttaaaggcttctattaagttaaacctagcttaacggagaatccttgatttgtcaatgattttcacgtaattcggttaaagttttctcgaagattgcgggtaatggggcttcaaagcgcatcatttcgcccgtcgttgggtgcttaaagcctaatacagcagcatgtaagaactgaccatgcccagctaaagttttgcggggaccataaacgggatcgccagcaactggccggttaatataggctaagtgaacgcgaatttgatgggtgcgcccagtttctagtcgacatttgattaatgtgaagtcttcaaaccgttccatgaccgtaaaatgcgtgaccgctgggcggccatcttcgacgattgcttgtttcatccggtcgacttttgaacgaccaatgggtgcatcaatggtcccctcgtcttcttcgatgttgccgtggactagcgcgatatattcacgtaagttttccttagctttgagttgggcggataaagattcgtgggcttcgttggttttagccaccatcaaaagaccagaggtatctttatcaattcgatggacaatccccggccggaagacgccgttgatttcagacaatggggtgtgcgccaataaagcgttgaccaatgtcccattcgggtggccagctgatggatgaaccaccatcccttgtggtttattgactacgaggacttgatcgtcttcatagacgatatcgagcggaatatcttctggggttaagtcgagcgtgacagggtctggaatattgacggtgacgacatcccctgttacgactttgcggttactcttacaaggttgatcattgacttgcaccaagtcttttttcaaccattgctggatttgtgaacgtgagtaatcgggtagtaattgggtgagcgccttatcaatccggcctgtttcagttgtaatcgttaattgtttagtttcagtcatgagtcactttctctttcaacaaaatagcaataaagacgcagatgacgcctactgttaaggcaacatccgcaacgttaaagatggggaaattaataaattcgatttggaacatgtctacgacgtacttaaggtggagccgatcgatgaagttaccaagtgttccggctaacagcaacgttaaaccgatccggtaaaatttttcagtgcgatcagaggtataaaataagtagccaattaccccgagggccacaatggtgacgaggtagaaaaaccactgttgaccggccaagatactccacgcagccccatcgttttgaacatacgttaaactcagcacgttcggaataacgggttgggttgctgcaaaggcaacatgggcaacaatccagctttttaaaagttggtcaccgagtacaatgactgcggctaaaacgatatagatgagcatgggaacctcctattcatacaatctaccattgtccttaaaatcggctgacttgtcaatcagttttcgagatgggcgttaggatattggaaaacgtgcttttcaagctaactttctgcgcttaaccaaatttgccaaatcgccgattgtatcggcaattcgtcaaattctattaatgctcagaagctaaccgtttcaaacgcactctagaataatccgctaatcaggccatcttctgtgacgtccatgttgagggcggctggtttctttggtagacctggcatggtgaggactgtgccggtcattgcgacgatgaagcctgcgccaagctttggaatcaattcacggacgtgaacggtgaaatcagttggtgcgcctaatgcttttggatcgtctgagagtgaatattgtgttttggcgatacagactggtaagtggtcccagccatttttttcgatttctttcagttggttgatagctttgccctcgaaaacaacctctttaccgccatagatgtcagtgacaattgtggttagtttcgattgaatgtcggcgtttgaatcatataatggttggaagtttttaggttgatcgagtgcttctaagacggcctgggctaaatcaaggccacctttaccaccatgtgcccaaacactagctaaaacggctttgacacccagttcagcacatttttcttggagcattgtaacctctgcttcggtatcacttgtaaactcattgatggcaacgactacgggaatgccgtaacgttgcatattagcaatatgtttggctaagttactaaaccctttgtctaacgcaccgagattttcagtggttagatcagctaaagcaacaccaccgttgtattttaacgcccgaacagtggcaacaatcacgatggtatccggagtcttgccaagttgtgggactttgatgtctaggaacttttcagcacctaagtcagcgccgaagccagcttcagtaatcgcaatatcacccatttttagggccgtttgggttgctaaaatactgttacagccgtgggcgatattggcaaatggtccaccgtgaattaaggctggtgtatgttcaagcgtttggacgaggtttggtttgagggcatcttttaaaagcatcgcgattgcaccggtgatttcgagctcgccaactgtgacgggttgccgatcataagtgtaaccaatgacgatttggctaatgcgccgcttcaagtcagtaatgtcagttgctaagcagagaatggccattaattcgctagcaacggtaatgtcaaaaccatcttggcgcggcatcccttgcactggaccaccaagtccaatgacaacttggcgtaatgcacgatcattaatatcaagcgcccgtttccaaataattcggcggggatcaatgttgagggcatttccctgttgcagatggttatcgattagggcggctaaagtattcacagcagcggtcaatgcgtgcatatcccctgtaaaatgtaagttaatatctgccattggtaccacttgggcatagcccccaccagttgcgccacctttcatccccatgacggggcctagtgaaggttcacgtaaagcaatgacggctgattgatctagttgacgaagggcgtcgccaagaccgacagtcacggttgatttaccttctccagctggtgtgggattgattgaggtcactaagatgagtttgccatcttctttttctttcaatcgattaatggcagcgaaattaaccttcgctttatacggtccatattgttctaaatcagcggccgttaaaccagcttgttcggcaattgccgtgattggctgcatctccttagcttcattttcctgtgctatttgaatatctgacataccgcccagctcctttttatttatgatactacctagtatagctgattacgtacggaattggcagatgggatgcttaaaaagaacgatattcttcgacacacttctttgtacgtggtaaaatgagcgcgtacgctgattaacatttcaaggagggattgtgatggaacgaggaatcgttaagtggtttagcaatgctaaaggttatggcttcatcagttatggagatgacgaggaggttttcgtccattttaccgcaatccaaaccgacggctataaatcattgaataaagacgagccggtattatttgagattaaagaaggcgcccgcggtttgcaggcagctaacgtgcaaaagatagcagaataaaaatacgtttaaacgctaaaaaagagccacgacacagtagttggtgggaaactacctgcgaggataggacgttgccgcgcaaatataaaaaggttgagccgaaaggttcaaccttttttgtagtaattaaataataagttgggagaaatcagcatgattcaaaccgtaacagaacagaacatcgcaagctttgttcaaacacaaccgttagtgattttagacttttgggcggattggtgtgcaccttgtcggattatgacaccgatgattactgaactacatgaacaattagctgatcagtttggcttaggaaccgttgatgtagaggatcaagcagcgttagctgaacaatatgcgattcaatccgttccaaccctattaatcttcaaaaatggtcaggcgacagaaaaggtaactggcgcttttccaaaagagaagttaaaaagatacttagataagaaaatcgctgaaatgtaatcagcgcattaatagtagcccgcaactttcattggagagttgcgggtcttttttgataagtagaaataaaataacccccttagctattgtctaagggggagatgattattgacgaaccatgtggataacacgctgataaaggattaatgcgccaatctcacaaagtaaaatcaaaacagctaatggaagataggtataactgcccatcacgccaactaatggggaaagaaaaatgccgaaaacatacataccaagtccaagcactgaagaagcaatccctgcatgttgtccttggcgttgtaaggccagtgaggtgacaacggcattaattagaccaagtgttgcgaccactaggaataaaccaattaaagctaaccagagacgattagagccaaagccactaattaagacgcagatggcaccgattaaaccaccaattaagccgatttttaattgttgtaattcatcaaaccaatggattaaaatggtggacatttcagccattaagataatcccaatcccattgattccgtagattagactgaaagttgatttagaaagactaaagacattttgaagcatgaaactggaacctgaaatataacagaacattgccccataaacgaggccttgaattaaaacaaataggatgaatgggcgatctttaaaaatggcttgaataccaaggcgcgattgttgtgccgattgcgcgcttgtggatactgtgtgtgtttctttgaatcccaaaatgatgcctaacaatagaagaaggccaacaatccctaaaaagccgaaaatgccttcccaagaggtgaaacggagcaaagcacttcctattaatggtgaaatgatggggaagataccgttgattgccatgagtaaggcaatgaattttgtcaattgtttaccgtcaaataaatctttagcgactgctcgagtaatgacctgtcctgcagagctcgctaacccttgaataaaccgtaaaaggaagaatagccaaatattgtgggtgactaacgataatagacacgctgtaaaagcaagggcggttccgattacgagtggctttttacggccaacacgatcgctccaggcacccatgaagatggggccaatcgcaagtccagccaaacacatggttagactcagttgaatcatggaagcagatgaatgaaaatcagcttccataatcggaaatgctggtagatacatatccactagtaggggtccataagcactcagtgaaccaagtaaaacagataaccatagtgttcttttttttgttaaaaccatgttaataaaccctcctaaataaaaaagtgtaaaaaaatagcccgttgaaaacgtagctagcgccgaacgaatttaattaattactattcatgttgcttcttagttacactaacataagaagtcgggtttgtggcgatatatgagcaatttttaatatgtaaatggtttctatttcagtttaaacaagttatgatggagataatgaaaaaagttgtcgaatgaggttttgccatgaaaattgcccaaaaaaataaaatattagaaacctgcctaattgcgggacggattatgattgaaagtggttctgaaatgtaccgggttgaagatacaatgaaccggattgcttataatgcaggcattcaaaagagtgttgtgtttacgacaccgaccggtttatttatcggaattgaaaatcaaccttatgtgcaactaggcgctgttgcggtgcggacgattaaccttgaaaaagttgaaaatgtgaatactgcttcacggcaatttgcgactaaggaaattacgttggatcagttaatgttacggttaaaacaaattgatcaggatacggctcattttccgttgtggttacaaattacagctgcagcagtcatttcagcgtttttgatgattattttttctggtgaatatgattggttagatatcataccgtcagcggtagccggtgctttaggctatgccgtctttgcggcggtcaatcgggtcacaacgattcgctttatcggtgaatttttaagtgcgacagtgattgggatagtcgcctatctattaactaggtggcacctaggagtcgatatcgataatatcatcattggggctgtaatgccattggtacctggtgtagcgattaccaattcgattcgagatttgctagcagggcatttattatctggtatggcacgtgggatggaggccatcctgagtgcctttgcaattggaacagggattgcgctcgtatttagattctttatgtaaagagaggttcatcagatgccatattgggttcagtttattattcaagcgttatttagttatatttcaacggttgcgtttggaatttgtattaatttaccaagacgcgcattattatggtgtggctctgccggtatggcagggtggcaggtctattggatgctctttaactttggtagcgggcggatgcttgctaatttgttgggtgcgttagctgttggaatttgtggcaatattatggcccgttataagcggatgccggtgattatctttaatattccagggttagtaccattagtgcccggtggaactgcgtaccgtgcgattcggaacctcgtgctaggcaacttaaatgaagcttcgacacaaggtgtttcagtgatcatgattgctggtgcgattgccgttggctttatgttagcgcaaattttagccgatataacacgcaaacgagcgattacgccgaaatgggtatcgcgtcactaaaaagtatgctataataaggttatgcgatgagtcgagtaagtctcggtaggcaactattctgcgaaggcagctaggagacccaaagatacaggataccacggttattcatttaaccacttgccgtattgcaagggtgttttcgcccgctgtgttgtggagcacaaggtgtttattcttcggaatactgtaaaaaaagccccttccgtcaggaaggggcttttttttgtgcgttcattttcttgcatgacagcgttactgatggtgcgatggtcgactaattcaccaatccgttttagatgtttgagatgtgcatcgtagtgttccgaaaaaacgagcgcgtataaaacatttaataggaagatgatggaggtattaatggtaaagttgccgatttttgagtagagtttttcgcgggttgtaatcggtaaaaagcaagtgcattcttgcgaaagtcgattttcaccgatactggtaatcgcaatcgtcgggatgttgcgggcgcgtaaaatagtgttaagtgctagtaagttgggattctcgccagaataggaaattaaaatcgcacaagcatccggactaagattataggcatcgtagttttcctcgccacgaaccgcagatagcgtaacgtttttttggatacgattcattttgagggcaaaatcttgcgcgatgagtaagtttgagttttgggagaagatttgaatatgatttgccttgaggagcaatgatttagcttgactcagatggtcgtggtcgagtaaaaagaagatatcatcaatcgtcattttgtccaagaccgccattttcttacaaatagtcatcaaactatccgtactcgaaaagggcagattgggatcgatacgcgtaaaatgtttattgaggtagcgccactcttctagatagtgtttcttaagagatttccaaccgtcaaaatggagttttttggcaatgcggaccagactggacggttgcgtataggtttgagcagcaatttcttggatggaaagctgatcgagtgcttctggagccgttaacaagtaatccacaaccacggtttcagcgggggaaaacgcgaatgtctctagtttttctttaattaacatgtaaccgcctccttttacaaaagattagcgatatttgtaaaataagtcaatcgataccctagtgatttgtaaattaatcgcgtttaggccattaatatcggcagtttatgcgaactcacttttaaacgagggcataaaggtggggcttgcggtttgcgttaggtatgcttaatttgtaaacaaatcaaaggaggcattcagatgacacggaaagtaaaaattgcaacgattggtggcggtagtagttacacgccagaattgatggaagggtttattaagcgctatgcggaattaccaattggtgaaatctggttagtagatgttgaagcaggtgctgagaagcaggcgattgtcggaaaaatggcgcaacgaatgtgggatgcgtccccgtatgatgttcagattcatacgaccttgaattgtgaagaagcgcttaaagacgccgattttgtgaccacgcaatttcgtgtcggccaactggatgcacgggtgaaggacgaacgcattccattttcatacggtctattggggcaagaaactaatggtgctggtgggatgtttaaagcatttcgaaccattcccgttattttagaaatcgttgcagatatgaagcgcctctgtcctgacgcatggttaattaattttactaacccaagtggcatggttaccgaggcagttttaagatacggtcaatgggaaaaggtgattggtttgtgtaatgtgccggtcgtcgctaagatgggagaggctgaaacgttaggtgtgccacagacggatttaatctataaatttgcaggggttaatcactttcactggcataaagtagctgataaaaaagggcatgacttaacgccgcaattgattgataaattatatgaagaaaatagcgggttaccgaaaaatatttttgatgttcctttctatcggaaacagttacagcaaatgaacatgatcccgtgtggctatcatcgttattattatcgtgctgaagaaatgttaaagcatggtttaacggaatatgcgactgaaggtacgcgtgcgcagcaggtgaaagtcattgaacacgaattgttcgagttgtataaagaccctgatttagattacaagcctaaacaacttgaacaacgcgggggtgcttattattcagatgcagcctgtgaaacgattgcgtcgatctatgcgaataagaatacagaaattgtggtttcaacgcgaaataacggggcagtccctgatttaccagcggattgtgcggttgaagtgacggcctatgttggtggggctggtgcgcggaatgttgcgtttggatcattgccaacagcagaacgtggttggttacagatgatgaaatcaatggaattgttaaccattgaagctgcgataacgggtgattatggcacagctttacaagcctttattagcaatccattggtgccatccggtgaaaccgcaacgcgcgtcatgcatgaactactgattgcgcataaggcttacttacctcagtttgcagacactattgcacggttggaaaaagaaggcataacgattaaggacgaagtggttcgaaagatgtagtgatcatccaaaaaaggattggcgagcagcgaatcctttttttaatcccttaaaaggcgctataatctgtaaagattgatagaatggtagcaaggggtggttagtaaatgtttgaacttgaaaaaatccagcagttgaatacattggagctatcagttttaaagtatgttttaaatcatcgcgcacaggtcgaaaaaatgacgattcgtcagttggcgacccaaacgcatgtatcgacgtcaacaatctcgcggttttgtgagaagctagggtgcgaggggttttcggaattcaagtatatgctaaagcaagagcggttggcgcaaaaaaagacatcgatgcctgaatacgatgtcatgttgccaattaccgagtttttggataaaacgaataacgaaacgttcagacagcttttatcacaagcaacggcattaattttagaggcacaagctgtctttttctttgggatcggcactagtggtgcactggctcagtatggttcgcggtatcttgccaacgctggtattttctcgctgagcatcaatgatccatttacaccggtggggatgcgagaaacagtcgtggcggataccttattagtggtgctctcggtgtcgggggaaacaactgaaatgttggcacaagttgagcaatatcaagcaggaaaaggtaaagtattggcaattaccaacagtacgcattcgactttagcgcggttagcggacgttgtgattccgtattatatgcctgaagaaaagaatggttccttgaataatacaacgcagataccggtggtttatattctagagttgctagcacatcgggttgcttgcgctcagtaagtgttgtttgaaacatgttttttttaagaaacaaataccaatcagtggtgcatgtgtttatcaccgttaaaggactagtcacccagatggcaacgcgctatactgcaattgtggaagcgcattctgaagtggcgatgttgatcaatcgccgtgattaaatagcgaagggaagttaaacacatgaatacttggattaatactaaattaatgccacctattatgaagtttgttgcgacgcggccgattacagcgttgaaaaatgggatgctatacgtgatgccatttacaatcgttggatcgattttcttaattttagccaacttgcctgttaagagttgggccgattggatggtttcaactggtttgaccccatattggaacgttgcctataacgcatcgtttgcaattatggcgttaatcgccgttgcggggattgcttattcttgggttcaggatgaaggttttgatccgttcccagcctcattacttgctattgtttgtttcttattagtgacgcgcccaagcactgccattgtttcggcatccggtaagattgttgtctctgttaaaatgatgagtcaacaaaccgggtttattgatcggacttggcttggtggacaagggatgattactgccattattgtcggtttattagtcggttggatttactcagctttcttaaaacatgatattcggattaaattaccagaacaagtgcctgcgaacgttgcaggttcttttaccgctttgattccagccgctgttttaattagtggctcactcttggtttatatcttcttcgacaaggttgcaaactcaaccttaacagaatcaatttacaatgccattcaagcaccacttcaaggaattaccgattcatttggtggcatgttagccatttctttcttagtaccattcttgtggttcttcggggtgcatggttcaacaattgttggtgggattatggggcctttactgcaagccaactcactggcaaaccaaaaaatcttagattcaggcaaagcattaacgttagctaacggtggtcatattgtgacgcaacaattacttgatcaatttatgacagtgaccggtgctgggatgacaattgggattgttgtttacatggcattctttgccaaatcagcacaattcaaagatttagggaaattatcattagcaccagcagtctttaatatcaatgaaccgattttgttcgccacaccaatcgtgatgaacccgattatgatggtgccattcttcgtgacaccaatgctatcagcaatcttaacgtggactgcgattcgggtcggtttaatcccaatgttccccggaacgttggtaccatggacgacaccaccaatcatttctggtttattagtcggtgggtggaagaccgcattgtggcaagccttaatgttactcatgacgttctttacgtacttaccatttattcggaaacaagatcatttaaactatgcttcagaacaaggtgcaacaactaaatagggggaaaggtcaacatgggacaacttagaaaagattttttatggggcggcgcagtggctgctcatcaattggaaggcgcttggcaagcggatggcaaagggattagtgttgccgatgtgatgactgccggggatgttaatcatcaacgggggattacagatggtgtacaaccggggcacaattatccgaaccacgaaggcattgatttctatcatcgttatccagaagatattaagttatttgccgaaatggggttcaagagctttagaacatccattgcatggacgcggatttttccgaatggggatgaagcacaacccaacgaagccggccttaaattctatgatgacctatttgacgaatgtctcaaatatcatattcaaccagttgtaacgctctcgcattttgaaatgccatatcacttggtcacggaatacggtggttggcgtaatcgcaaagtcatcgactttttcttgaactttgctgaaacggtcttcaaacggtatcgtaataaagtgaagtactggatgacgttcaatgaaattaataatcaagctaattaccacagccagtttgccttatttacaaattctgggttacagattcaacctggtgaagatgctgaaaaagtgatgtatcaagccgcccactacgaattagtcgcgagtgcaaaagctgtgcaaattggcaagcaaatcaatcctgatttcgaaatcggctgtatgattgcgatgtgtcccatctatccactgacagctaaaccagaggatgtgctcaaggcagaacgcgcaatgcaaacccgttactggtttgctgacgtacattgtcatgggcgctatccagaatggctcttacaatatcaaaagaaccaacactacgatttagacattaccgcagatgatttgaaagaattggctgcagggacagttgattacatcggcttcagttactacatgtcatttgcaaccaaggacaaaggtgaaacaacgcttcattatgatgaagaacacgatttagtacctaatccatatgtcaaggcatcggaatggggctggcaagttgatccagttggcctacgttatgtaatgaattggttcaatgatcactatcacttaccagaatttatcgtggaaaatgggtttggtgctgttgatcacgttgaagcagacggccaaattcacgatccttatcggattgattatttacgcgaccacattgttcagatgaaaaaagccgtggaagatgacggtgttgatttgatgggctatactccatggggctgtatcgatttagtttcagcaggcaccggacaaatgtcgaagcggtatgggtttatctatgttgataaaaatgacgacggaacggggacgttggctcgttctaagaaggactctttctattggttccaaaaggtaatcgccaccaatggggatgacctagcataatcatgaatagcgacgcaggcaaattgattttgtctgcgcctttttttgttgaaagaagcctatgcattattaataacccatttttctgaaataaaactgttattttatcgtgagttaacactaggcaattaccattatgaaataaattatgagaattagggcctatctaatgcaaaaataatcactatcgtttacaataagtaagtattaaaaatggaatggggtaaagaaatgacaattacatatgtcgtcattaacatcgtgatcatgctcatcatgttatttgttttaaacaagatggcccggattcacgttaagtttagtcgccgcgttttcacggcattgggggtcgggattttattcggcgcactcttacagattatcttcaaaacagattcaacggttgtcaaacaaacagctgattgggtcggcattgtcggcaacggttatgtctcgttcttaaagatgatcgttatgccgttagtcatggtttcgattattcaagccattacgaacttggaatcatctaagggcttagggaagatggccggcatggtcattggaatcttagtctttacaaccttaatcgcagccacagttggttcagtgacagcggatgttttcggcttaaatgcgagtgatattcaatcaggccaagtcgaaaaggcccgctcgaaagaattacaaacgaagctaggcgatgtacaggaacaaactgttcctgaaaaaatcgttagcttcattcctgaaaatccattcatggatatgacgggttcacgacctacatcaacattagctgttgtgattttctcagctttcttaggagtggcagcattacaattacggcgtaaaaagccggaacaagcagaaatgtttaataaaatcgttaacgccttgtacacggttatcatgcgcatggtaactttaattttacggatgacaccttatggggtgttagccttaatgacaacgaccgtagcacaaactaatgttaaaggaattctcagtctaggtgagttcgtgattgcctcttacgtggcattaatcatcatgttcttgattcacttcctattaattacgttcacggggttaaatccaatcaactacattaaaaaagtgattccaacgttaatctttgcgttcacgtcacggacgagtgcgggttcaattccaatgaacattgaaacccaaacgaaacgtttaggggttgaagatgggattgctaatttatcggcttcatttggggcttcaatcggtcaaaacggctgtgcgggtgtttatccagcaatgttagctgtgatgattgcaccaactgttgggattaatccttggagcatcggtttcttggttaaattaatcttgattgtggcaatcagttcctttggggttgctggtgtcggtggtggcgcaacatttgccgctttaatcgtactttcttcaatgaacttaccagtcgggttagccggactattaatctcagttgaaccattaatcgatatgggtcggacagccttgaacgttgatggctcaatgactgctggggtcttaacggctcacttattaggtaaattggataagaacaagtttaatgatatgagtttgacggaagattcagacgaaatggcttaatttcaaaaaatggagggtttagtgatgcgaacgattattatcggtgccacagctgccggaacaagtgcagctgcgaaagcaaaaagaacgaatccagatttagacattacgttatacgaaaaacgggactatgtgtcctttggggcttgtggcttaccttattttgttggcgagcactttgaagatcccaaccaaatgattgcccggacacctgaaaaatttgctcaacaaggtattgatattgcgcttgaacacgaagtactatcagttgactttgatgcgcaaacaatcgtggttcgggatttgaaaaccaatcaagatcgcacagaatcttatgatcaattaatgttagcaacgggagccacagctgtgatgccaccgattaaaaatgttgatctcaaaaacgtctatcatctacggacgatggcagatggacaagccttacgtgaattaggacaagacccaaaggttcaatctgtaacggtgattggtgcgggctttatcgggttagaaattgccgaagagttccatcaattagggaagcaagtccgggtcattcaactagaagaccgaattttaccactggcttttgatccagaactaacggacatgttcgcggatgacttacgtgataacggcattgaattacacttatcagaagctgttcaagccttagaaggaactgttcaggtgactggcattgtgactgataaggggcagtatgcgacagacttagtgattgtagcagctgggattcggcctaatacgcaattcatcacggatgatcgattgaagaagttgccaaatggtgcgattattgtcgatcaagcagggcggacatcgattgaaaatgtctatgccgctggcgataatgcaacggtcattaacagcgtgacgaaccaaccgatgtattcagcacttgccactggtgccaataaattaggccgaattgtcggcacgaatttaggcgggcaagccgctcaattaccagggatgttgaattcagccggtgtgaaattaatcacgctagaagcgggccgaacaggtttgactgaaaaagaagcggcagaggctggtattgatttcagtactgttttaatccacgacaagaaccaaacgaattattatccaggccaatcagatttaacgattaaattgatttacaccaaagcagagcatatcttaattggtggccaggtggttggtcaaaaagacgcagtgttgcgcgttgatgtactcgcaactgcgatccaagcgaagatgacaactgaacaactcgggttactcgaccttgtttatgcaccaccgtttgcaagaacgtgggatgcactgaatgtggccggcaatgttgcccattaattaaaaaaaagtgacaccgcacaaaccgtgtagtggcgctttttttgttgcatgcttaaacagttgttcatagtgtttacttgaatgtttactcgggtctgtgctaaaattgcatttagaaattaaatttttgcaaagttagttatgaattaattacgatgattaagaaaacacaaataaaaaatttatcgacaggagacagtttaatgaacaacacaaagagtttgattgcattgagttctggaattttaggggcagctgggatcggtttattgagtgcagggcaagtacaagcagcaacgacagcaaccgtcaactacgcagatggtgcaacaactgtttggacaagtccaacaactggtcaaactgctaaacgatacatctttaagggccaatcagtaaatcttttagcatcacaaaagattggtgctgaaacatggtaccgaattggaaacggcgaatgggtacctgaacgttacttaacaaccagtgacgctacaccagctgaaacaacaccagcaacagaagcacctgctgctcaaaagacagctcggattgcctatgccggtggcgcaacaactgtttggtcaacagcaacttatacagccccaacaggccaatacttaggttatggtcaaaccgtcaacgttgtgaaaacagaaactgtttctggcgaagaatggtatcaacttgaaaatggcagctgggtaccagctcgctttacaggtgatggtaagattgaagccacaccagcgcccgatgcacaaccggtagcaccagcacaacctacaacagcgactcctgtcgaaacaccagctgcgtcagcaccagttgcaacaacacccgcgcaaacagaaagcacgcctacaacaccagcacctgtcgcagaaagtgaatcaacaccagttgaaacgcctgccacactagaaagtacaccagctgtagcagaaagtagtgcgcctgctcaagcagaaagtacaactcaaacacaacaaccagctactcaagaatcatcagctcctgtccaagaaactgcaccagttgaaacaacaccagccccaactcaaaaggcaccagttgtaacgacaccaacaccagccccaacggcacctgcagcaacgactggtaatgcgcaagctgttattaatttagcgatggctcaaattggtaaaccttacgtttggggtgcccatggtccaagtagttttgactgttctggattaatggactatgtcttcagaaatgctgctggtaagagtatcggtggttggacagtccctcaagaaagtgccggttatgctgtttcattaagcaacttgcaacctggcgatttattattctggggttcacaaggtagctcataccacgttgcgctatacattggtggcggacaatatattcatgccccacaacctggcgaaaacgttaagatcggttcaatgcaatactatgcaccaagttttgcacgccgtgtcttttaatgattgcaattaagcgaacatctcacctaggtgggatgttttttgtattttagccctaaataagctatgatatgtagagatttaaaaaaggactgacgagatgaagatagaagtacaagcatttatcaatcaaattcaagatcaaacatatttaacggatgaatacgagctccccacgccagatccttttgtggcggacggtattttggcacagttaaaacccgctattgataaagccattgaaaaacaagctttggcctctttttcggtgctgacagaatgtgctggcgaacccgttaaagtgacattggaaacagggattgtgaatctaccattacaatacattaaaaaagtaaatcaattttttgaactcgacgaccaagcagaggtgaatctttatttatacgtgacatcgccactcattaatcgctcgaacatgcggattgacttaattgggacggtagcttcgtttgaagaagcggcagctgctaattggacgaagattgccgacttgctaacaaaggacttggaagccgtcgtaatcggttcacaggcacctaaagaagaaccagtcgaaaagaaggcacccgctaagaagaaagccgcacctaagaaaaaggcaacgactaagaaaaaagcgcctgccaagaagacaacagctaaaaagacagctaccaaaaaaacaacgactaagaaaacaaccaccaaaaaaaagactacgaaaaaagcagactaatttagtctgcttttttgatggcgtctattaaaggcaagtcgccgttaacaaacgagaatttcttgtggattgtttcggttggatgttctaagacggtgcgaatcatcgcagcgacatcagcacgtgcaacttgcccaccagatggttgcattgtcactaggccggtagcttcgtcgtttgtaagtgtcccaggacgcaagatggtccaatctaaaccggagaattcaagccagtgatcggcatagtattttgcagcgtagtacggtttaatactttcaggccatttagttcgatcctcaacaaagagtgcactgaccatgacgtagcgactaacttcagcaatcttagctgctgccatactcttaacggcgccatcgagatcaaccaacagtgtttgatcatcgcctgttttaccgccagaaccagctgtaaagacaatcgcatcatgatcggcaaatagtggtgctaaagccttaggttgtttggttaaatcgaataagacaggcgtggcccctagttgtgcaagttcatccgtctgttgttcgacacgaatgccggctgtaacggtgtgaccggcagcaacgagttggctaattaggagctggccaacgttaccatgggcgccaataacaaaaatccgcatagtaaaacctccaatataaatgtgtgtgctgttcattatagtagttattgaacagtgacgcaaagatagtggatttaaaaacctgtgttgtagtacaataaaattcggcaccttgcgaaaaaatgagtgtgctttagggtatataatcttgaaagtggctgatggcaacctttaaataggcaaagctaattatgggattcgttttataaataaatctaagaatcctctcattttttcacaaagttgcttattagaatatcatgaagccgtgtttgttttgtgttatggtacagatatagagattgtgatttattggataagtagtcctatttgttaatgctatctcagaaagtaggaggagaacatgacaaatcaatatcgaagcgtttttgatatcattggaccgattatgattggcccttcaagttcacatactgctggcgcagttgccattggacatgttgctaatcgtctttttcatgcaccgattaacaaagttattgtgcgttactacgaatcttttgcacaaacccaccaagggcacggtaccgattatgcaattattagtggcgtgctaggattcgatccggccgatcaaagggtaccaatggcagttgatttagcgcgacgtcaaggtattgacgttgtcttcattgaagatccagggaatagtccggtgcaccatcccaatacagcggaattaacgttaatcaatcgtgagaaggaactaacgatttggggctgttcaattgggggcgggaccatcgaaattcgtcaagtgaatttgaatggcattgtgattaaaacggatggcccgttaccattggtttttgtcgaatcggaacaagaaatcggcgatgctttagaccagatatttgaaggcaactatcgtgataagcgcatatcggttaaagtgccagatcggtttttgtataaaatcgaactgattgataagccgtacccggaacagattgaacaggtccgcggaatgagccaagacgttattgtgttatagaaagtggtgggaagatgtatacaacaattcacgaattagtcgagacagcgcaagaacggcaactaccaatctcggaattgattatcgaacaagaggttgcgatgagtcacactagtcgtgaggtcatttgggcaaccatggggaaaaacttggatgtcatgattgcggccgaagaaaaaggcgtgaccggtgaaggtgttcagtctgccactgggattacaggcggtgaagcggttctgttgaagcggtatcgggaaaagggaaagtcgttatcaggtaatgtgatgttgaccgctatgcaaaatgcggtggctaccaatgaagtcaatgcttcaatggggatcatttgtgcaacgccaactgctggttcagcaggtactttacccggtgttttgtctgttattactgagcgcttggcgcttgatcgggatgcgcagattcggttcttgttttgtgcgtcagcctttgggatgattgttgccaataaggcgatgattgccggggcaactggaggctgccaagccgaagtggggagtgctgccgcgatgggcgccgccgctgcagttgaagctgctggtggcacaccacaacaatcgtcggaagcattcgcgatggcgatgtctaatctattgggattggtttgtgatcccgttgctggattagttgagataccatgtgttaaacgaaacgtgattggtgccgtcgatgccttgaccagtgctgatatggcattggcagggctaatcagcaagattccagctgatgaagtgattggtgccatgaaacgaatcggtgaagatatgccatctacattacgtgaaactggtttaggtggattagctgctacaccaaccggggttgcattgaagatgcaaatctttggtaaggataagagccttaaataaaagcgacttttaggaggagcaatcatgcaaaagaaactttcaaaatccgcatacggcggtgtttcaggtgagaaatatgtaccgtatgtcaatcaaggcgacaaaaaggtcggcaacttagcgattctaataatggggagcattttagccattatttttgctgcttcaacagcttattctgggatgaaggccggtttaaccgttgcagccgggattccaggttcaattattgggtctgggttagtcggcgcctttgccaaatcaaaagggattttaggcaagaatattatgcaagggatgtccagtggtggtgaatcaatcgccagtgggatgatttatgttttaccagctattattttaattggtggccacatcaacttcattcaaggggtcatcgttggggtgctcgcaattcttttttcaatggggacagcctcattagtgcacaactacttaatggttgaagaacatggtaagttggtttatccagaagccatggcgatttcagaaaccttagttgcgtcagatactggtggcgattcgcttaaatacatgggtgttggctttggtatcggtgggattattacgatgctaacttcatcagtgtttggtgtcgtcaacaacatgattagctacgttggttcatcattttataaatggaaattagacgttgaagtgaatccattacttgcaggaattggttttatcgttggattagaagtgtcattaacaatgtttgcaggtgcgattttatccaactttgcgattgcaccgttaatcggttatttcacagatatggcgggcaacagtgcgcatgtttggaataacacgagtttagccgtgaatcaaatggccgttaacgatttatcaagttcatacgttaaatacattggtgccggaatgatgctttgtggtggtttaatcggtgcgattaaattaatcccaaccatcgtgacgtcaatcaagaaaacactagctgccaaaaacgtagcaggcgaagaaaagaatacgcttggtatgattgccattgttgttggtggtgttgggatcttcgttattggtattatcattgcgcaaaacttcttaatggggattgttggtgcattactagcagccatcttaagtttactctttgtcattgtttcggcccgggttgctgggacgattggttgttctaacttgcctgtatcagggatgacaattgcgtcattagtgattatgacggtagtcttcgtattatttggttggacggacaataaccatacgcaaatcttattaatgttcgggacattcgttgtgaccgccgttgctgttggtggtggctacatgcaatctcaaaaagtaacatatgtcattggtggttcaaaatctgaaatgatgaaatatttcatgattgccgggattgtcggcgtaatcgtaactgtcggcacaatcagcatcttatcaccacaattcgttacagatagtgcaacaccagcctttgggttgccacaagcgaacttaattgctacattaacatctgggattatgacgggtaaattaccatggatcatgattatcgttggggttgtgatggcattagctttctacttcttagatttaccaatcatgaccgttgcaattggtttttacttaccaatttcaaccacttcaatcatcttgatcggtgctttgattaaagtctttattgaaaaagcaacgcgtgatgaagcgattaagaataatcgggttcaaagtgggattagtttatcatccggtttaattgctggtggttcaattattggtttaatcgggattattctccacgtaaccggtgtgttaaaagatcgcgtgattactggttttgcgaataccaatgcaatggggattatcttattggttgtcatggttgtttcgattactgtgccacttatgatgattcataaaggaggggcaacagaagatgggacgacagaaagcggagattgatttagaacaactcatctatgaaaaaaatccgcaagttcagtttaagttacaagctggccaggtcaccattattcggccgcagaatcactggattcaacggacattacggcgtttgcatgtgaagattccgctagaaacacagctggaacttgatgattatggtagttttgtctttaggcatgtgaatggaaaacgcagtgtccaccagattggccaagcactggcaggacagtatgatgaagccggtgaatacctgtatgaacgattactcgtgtatttgaatcatctagaacacacagaacatttgatccggcgggtaaccgactaagttttattaatcaattagtgaatcacatttttaataaaaaggagtttttcaaatgacagacagaatcgaattatcagcatgtacttcaatgatggtagggaagaatgcgtcaattgatggctctacgatgatttcgcgaaatgaggatcgcttctatgcaatccatcctaaacggttcttcgtacaaccagcagttcatgatcgacatgagacatatgtttcaaaatataacggcttaaccatgccgttaccgacggacggttatcgttacacatcaacccccaacggcgatttaagtgatggtttaaatgaagaagacgggattaatgaaaaaaatgtcgccctctccgcaactgaaagtgtttatgccaacgaacgggtattagcttatgatccgttggtcaagcaaggtttagctgaagattcaatgtgtacgttggttctgccatacatcgattctgcacgtcaaggggttcaattgatgggggatttgattgctaaatacggttcagctgaaggcaatggcgttcaatacagtgatcaaaatgaagtttggtatcaagaaattgttactgggcatcactgggttgctgttcggattccggatgattgttatgcagttgccgctaaccaaattgccatcgaagatgtcgactttaatgatccagaaaattacatgtggtcagaaggtattcaagaattcgtcagtgaaaatcacttgaatccgagtgaagctgaatggaacttccgtaagatttttgggacggatactgaattagatcgtcactataacacaccacgggtttggtatgcacaacgctatttgaaccctgaaatcaaacaagaacctgaatcgagtgacttgcctttcattcgcaaggctaaccgtaaaataagtgtggaagatgttcaatatgtgttaaaatcacattataacgaaactatttacgatccacttggtaatgggacagaagaacaaaagacgatttatcggtcaatttcactttcacggacgcaaaactcacatatctgtcagattagaaacaatgtgccagatgctgtgcgtggtgttcaatggttaggtttgggggtaccaacattctgtccacacgtaccattctttacgaatgcgatggatacggatgaaagttatcgcgaactaccagcgaagatgcagttgaagaacgcttactggttatatgaagcattagcaatgattgttgaatcacactacggggcctttaagaaagctgatattgactaccaaaaagcattatcagaatgggcaagaactaagattgctacggtggatgctgctgtaaaggcggaagcgaatgccactgatttcttaacccagcaaaatcatgaaattgctgcacattaccatgaagcaacaaccgatttgttagcgcaattggtgacagaaggaacgcaactttctaagttgaccttcgtcatggataagaacctatagccaagtgcgcactttaatcatttgtcacactcttccaaggggggagtgtggcttttttaatcgatggaggtgctacagtgattgctttaaaaggaaattcgaaaaaaattattatcgcgatggtatacggttttttggcggcggtgagtgttaatctgttcttgattccggcgaagacgtattcgagtggggtcacggggattgcccaattactaacctcgttagtcagctatatgggcggctcattaagtgttgcgatgttggtctttattttgaatgtgccattattgattctggcatggttcaagattaatcatcagtacgcgatttttagtatcgtcgctgtttttacgagtgtccttttcttgaaggtcattccagtacctgttcacccaattgtcaccgaacgatttgcaggtgccttgttcgggggtgcattgattggtttaggggttggcttgtgttttaaagcgggtttttcaactggtggcacggacgtcattgtgacgttagttgggcgcttaactggcaaacgggttggtgttgtgaataatatcatcaacggaatgatcattcttgcagcgggcatcttctttggttggggtgctgccttatacagtatcgtcgaaatctttgtttcaagcttgttgatggattatatctatattcaacaacaaaaggtgactgtgacgatttttaccaagcgacctgaagaattgaagaagcgaatgcgtgactttattcatggtgcgactgaattagatggaactggtctgtataccaaccaagaaacaacagtgatcatgacagttgtttcaaaatacgatctaacggaattaaaacgggtcgttaaggatgccgatccgaatgcctttgttaatattcaatccacaatgaacttgtggggtaaatttgaaaacgtcgaataatagtagctatcctctggaactaaaaaacggtcctttcaacaacgctaagttgtgaaaggaccgttttttttatgttgtttggcggagttgaccgtcttcgatacgccaaacgtgatcgacgagatctaaaacccgttcgtcatgtgttaccatgacagctgcgcgtttttgttcatgaactgcatcgcgaattaagtggacaatttcacgaccacgttgcgcatctaaactggcggttggttcgtctgctaaaatgagtgcaggttgattgataagtgcccgagcaatggcaacccgctgcttttcaccaccagaaagcatagcgggataactatgtaatcgatggcctaatccaagttgtgtcagtaattgttcagcggcggattgatcgcgacgacgggcgattttttgtaaaaaagtcagctgctgagtgaccgttagatagggaattaattctgaactctgaaaaataaaaccaattgattcgcggcggatttgtgtttgacgattacgattgagtgttgcaagttcttgaccggccaaggtaacacgaccggctgtgggttgcaagagcgcgcccataatcgtcaacaaagtacttttaccaacaccgctgggaccaacgatggcgctaaattcacctggctgaatcgtgaaggagatatcttttaaaatgtgattaatttgatcaccatcgggataatctttggtgatgtgttcgagtgttaaaatcggtgctgacatattaatgacctccaatagctgtgatcgggtcaatccgaatcacttgaataagggataatagggcgcttaggatggcgacggctaaaaatagaacgctggtgccgatgatcgttggtgctgtgagcataaacggcatgctggcaggcattgactgggcgatgacactaatgataccgccagccaaaagaatcgccactgccgttaacaagccaatctcagagatgatgtgctggctgagatagcgtgtggttgtgcccaatgcttttaaggccccaaagtcccgtaatttctgtagggtaatgatataaaagaaaattgcgaggacaaacagtgagatgacgtataaaaagccgatcatcaagtacaatgaactttgttctgcagagtagccagggatgttatcaatcaaggtttgtttgctgatcacttggtagtgcttgttaaccgacaagggccgtttgctagcaaacgcgttataggtcgtcttttgcgttggaaaaatggtttgccactggtggtggtttaaataaataacaggcgtatgggcataagccatctgcttgctaaagccgccgattttaaattgctgaccagtggtactgtctttaaaggtgtcgcctaattggtaaccattggcttgtaacttgctgctgaccaccactttttgggtggcttggttggacagcttttgaccttgggtgactttgggtgtcatgaagctcgtagcgtcaactgcaatgtaggcaatgtcagtttttgtttgttttttaggccgctcgatggtggcttgggtgacgttgatgggtgtcagtgattggtgtttgagagcttgccaatcagattgggtgagtgccgagcgactcaaccgactttccgaaccggcttgtaaaacaaaatgcgtcgccggcgtatttttaatagccgcgccactatcgtttgctaaaccggcagctagtccggtgatgaagagtactaggaaaacgattaaaaagatgataaaactcagtgcgccaaattttaacttattatggcgtaattcttggattgttagaaacatatgccgacctccgatgacttgttattaaggctactataacgatggttagttgattcaacaataatcaatctaagtgtttctgtgttataatgcacacaagttagtcaattgtgatgtaaatggaggctgaaagatggttaatctgcaagacagacgggttaaacggacacataagttaattcgcacaagttttattgagctcctgctaaaacacccaattaatgagattacaattcagatgattgccgaccgggctgatattaatcggcggacgttttatttgcattatacggatatctacgatcttttaagccagacagaagattttaccttaaatgagttcagccagttgctagaacgttttgagttgccttctgaaccacagattgttggccaaactttctttagatgggtcttgtcatatgtgcaagacaacgagtctatgttacgggtattgtgtcgtaatcccgattcacagttaatgaataaattagttgcgttgaccgtgactcacggcaagcgggtgattccatttcagcagccggaaaacgctgattatattttgaattattgttgttggggtctaatcggtgttttgcacactgcattgtttaaaccagcgtttgacgcccagcaattggcgctcgttgctgaacagttattgaatgcttctttacaagtcagcgaaattaaagcatagaaaaaagcccaccggtaaataaatgtcggtgggcttttttctattttattttgctttagcagcttttaattgcttgaggttaacaacgatcttgttgtttaattccgaaacgttggccttgtcggctgcatcgaaatccgtaatgctaattaaagcggagttttcatatactttttcaacagttcctgtaaatgcaccatctaggtcttcgttcactttgccggttactaaatcaccgatattgagattttctttatccatagccaaaaactccttcagacattattaaaattaccaaataaggtgataataaactatgtcatggtaaatagcaagacttactgctataaattaatcgtttgattgtgaatgaaacgaaattggctatttaattccccatctaaatacgctaaaacgaaggagtgttaccggttacaaatcaaaattgaggggaattcatatggaaccttacttagttttttcagatattgatggaacgttggtccttgaccatcaaatcgtgacacctttgaccaaacgcgtgattcgaacattacaaaaacgcgatgtgattttctatattgccaccggccgaatgtacaatcttggccgggtaatttcgcggcaaattaacgatgatgtccggattgtggcttctaacggtgctgtctttgaaaatggccatcagatgaacaagcattatttaggtaaaaaagcgctcaaagctgcttacgaagcatgtttagcagatcccaatttatctgcgcacttttttaccactgacacagcttactatacccaagaaatccccaagtttgttgcgcgcgatgcggggaatttattgttgaatgccgatattgataatcaaccggtgactgatttagaaatgttgttgaatttaagtgatcagattactaacgggattatcattggtcgcggtcatccagagagtttagcagccgctaaacaacgattaatggatcaagctgtgatgagcttgtcttcttctggtccagacaacatcgagatgattccaaccgggattgataaagccactgcaattcgccagattcaaatgattcatggaattgatgccgatcatacaattgtctttggggatgggcaaaatgatttgggaatgttgcaatcagcgaagtacagtgttgcgatggacaatgccttaccagaggtcaaagcggctgcaaattatgtaacagaaacgaatacgaatgacggggtcgctaaattcttacaacaacattttgaattagcactttctgatacagaagttggtctctaggggcttgacccgctttttatttttcgatatacttatatcacggttgttaatcaaccgtgaaatgctgttttagctcagtaggtagagcatcaccatggtaaggtgggggtcgtcggttcaaatccgataaacagcttaaaaaattgagtgtgactcgaactgggtaggctttgaggattaacagggaaaagggcattatggcgggacttgccataatgccctttttgcagttaaccggagaagactgttcgaggagcacgttaaaaaatgagtgcattcaagcttggtcaacttttgagcattaagtcgagaataaaaggcggacaacatttctaacatgttgtccgtcttttttaggcttttctggttaataaacgttcagttaattgttgtagcgttgtttttgcgggcatgtcgggtagtttcgcaagaccagcgagtgcgcggtttgtgtaatcttgtgcgagtgcttgggctttttcgacacttccagattgacggacgatgccttgaacagcgtgcacatcggcatcagtcatagctgcttgtttttccaagtagggtgctaatgtttggcgattggattgcagtgccatgattaacggaatcgagtagacgccgcgtcgcatgtcatcgagaactggtttgccaaaatcgacatcggtctgagtgtaatctaagatatcgtccagaatttggaaggcgagaccgatatttaagccgattttctcggcttggcgggcaaacttcaagcctttttggctttcgtaagcaccgatgaagcaactgagcgcgaacagttggccggttttaccgttaatttgttgtaggtactgttcgggggttaaatcgagattatatcgggttgtcatctgactgagttcaccgtcaagaatttgatccatcgtttggctgttaaattggatgctcttcaaatcgctcgcataattggctagtaacttgaagcagacaacgaataagtaatcgccagcgtaaacggcgacatctttgccgaaacgggcttgaatcgattcttgatggcgacgtaaattggaattatcaacgatgtcgtcatgaattaatgtcgcagtgtgtagcgtttcaacagcggcggctaatgcgatcatcttctgtcgatcgactgcattaaactgtgaaaataataagcagtaagcagggcggagcaacttgccgccagcactaatcatctttaaaatggcgtcggtgacggcttgatttttggtgtgaatgttgtcttcaatgagcgcaagactttgcgcaagttcggtttcgatttctggatagttctgccacatggcatgtactttcgccataattaactccttgttaaattaaatttcgtgttgggcttttaaaaaagtcagggttttgacatgttcgaataaaaaattcgcggctacgccgaccgcaattccggcgagaataccgagaaaagcaagcactggtagatagaggaggacttgccaactctgggcaatgaaactcgcgacgcagagttgaccgacattaaagagcagaccaccagcagctgagatgccaatcatactcataaagcggcggctaaattgcttgaggagtaccatgccaaagaaacttagcgttgccccagcaatgctatacataaaagtagagagggttccccctagcaaggcggataaaacagttcgcatcaccatcaataaaaagcagtcgctgaccggtagggtaaataacgaaatgatggtaattaaattggctagtcccaacttagcacccggggctacggcaaatggaaatggaatcgcgcgttcgacaaggccaataataatcccttgagcgcacaagagtgcaatatagatgtatttacgcgtttgatcgttagtcatcgctgtactccttttaaatcaggcagaaaccatcccgcccgtgtcggtcccatccttggctttaatttcaatcagtaacttgtgtggtaagcaaacaatggtttggcctggcttagaaattttgccacgcttaacatcaatctgattgaagcaattggcttcagtgacctcaatggcatgatcggttaccttaattttgttgtaatcaccgccggcatcgcgataagtgaagtggctaacaccatggtgggtggttaggttcactttgtagacggttttgccatcgtgtttgacgtaggccgtcaatacctgcgcgtttgaatccgctgcttgcgtcgtttgccattcgtgccaactaaaaacagcaactggggcaaacgatagaataaacaggccgatgactactattatatcaccagggcgaatcattttgatgtaacggttagcgcgaatttgtttaaacataggcgtcagtctttctctctaaaatagcaataaaaggggttatgacaaaagcctgtctgtcataaccccctccttttgatagctgtgaattgcttttataatgtgctttcaaaagcattctattgcgtttagcactattagccaaacaactagctacgctagttattcgtctaattttgctaatccgcatagaataaacgcttttgacgcactcagttttataacgtgctttgaagttaactttctgcgtttagcgctgtgaatcaaatcatcgactatgtcgctaattcgcttccctgtgctaatgcttaaagtcaaaccgtttcaaacgcactcattgatttttgtatagtgcacgttgttggccgtagcgccagtgaccgagatgtttttgtaaatatggaacaacccatttatctaatccgaaggcacggcctgaaccgttcatgcaggcgagggccattggaataatccaaatgttaacccaatagaacatccctgaaaggcagaatgtgataaccattgcaacggttactgcgctcgttaaccaagtgaagagaccagcaattaaagctaagccaattaaaatttcaatgatggtcattgttttttgcatgaagaaggcgacttcttggtttggaatcaagaccttcgtgatgctgtagaaccagtggggcatcttatcgaagacgggcattggatcatgaccgaataagtaagaaaggccgaatgtgactttagcagttgctggttcagcagccccgcctgcagcggcaccgctagcagcacttgttgcatccgccgctttagaagcaccgctggtgacagctggttgaagccagtcaaaaggtaaccggagcttattggtgaaccaagaaccttcaccttgaaccttgtcccaacaatcaacaagccacattgcgcctaagaaaattcgcgcaggaactgtccataaaacattaccataccgtgaaatatgaccgcgcatcaagttgcgatcgttcttcgttctgaagaactcattcattgaatagtggaataaatcgtagccagaataaatctgaacaaaatagagcatgttgactaaatgtttaactaatgtggcaaagaacccactgagatggaagaaattcatcaagttggcaaccgcatagcgagaaccaattgaaaccatgaagccggaatagctccctttgtatgggacttttgctttaccttcttcagttgcgatgatgttctttagggctgttgcagcagatgcttcggcgccttgaacaatttggggttgaccgcggccgtcatcagtttcatcgaagaaagccacatcgccgacaacgtaaatcttgtcatcgtcaacagattgcatgaattcgtttgtcacgattcggccggctttaccggttgttaggccaaattgtgccgcttgtgaggaagctttgacaccagctgtccagattagagtggcagttgggaaagttgaaccatcatttaaatcaacatgcatttcgtgaacacctgtaacaccggtattcttgcgaacatcaattttttgtttagccatgtagcgttctgctttggctgcatcgttgcggtcgagcatgttcatgatggttggtgccatttccatcattgtaaattggatttcttcgggatcaatcttgttatcagctgctagttcatcacgccagtcgcgtaattcgccgatagtttcagttccggtaaagccagaaccaacaaccacgatattcaaaagggcccggcgtttttctgggtcgtgttcaattgccccacgacgaacaacatcgataatatgttgcttcaattcaacagcctgttcccatgaacctaaagtgaaaccatgttcggcaaccccaggtgtgccaaagtcgttaggttcactcccaatccccaacataacttgatcataggcgtagcgtccatgttcagtaatgacggttttgtttgcttgatcgatgcgggttaccgtatcggtcaccaacttaacgtttttgcggcgacagaagagatgttgcaaatcgtgttgaacgtggtcttctggcacgcggttagcagctacttcgtgtaattccgttaaatacgtaaagtaggaatgtttgtcgattaatgtaatttgataatctggattcttcttgtaatatttcgcaagttttttagtcgcatagatcccggcaaaaccggcaccgatgatgacgatgtttttttgagccatgatgagccacccctaaatgaaataaatgcgttttcaatcagtatccattatacagaataaactaaagattgtctatttattcacggataagattaatgggattgatgactattaaggaaaccgttttaaattgtgtaaaaccaaagttaatcgccgtaaaataagtgatttaaaagacttgaactttttacataaaaaagataaactgactttgtgtgaaggttgatacaaactatatgattatttatgaaaagggcgggaaaattatgaaattaagtaaagcattagctagtttatcagttgttgcaatgtcagcaatggtattagcagcttgtggtaatagtaataacgctaaagattcatcttcaaaagaggcaaaatctagttcagtcaaagaatcatcaagcaaaaaagcaaccgctaagaaacaagttgccggcggtgaattaaaagacggcacttacaacttagaagaaaagaactacgaaaataattatcgcgttaagatgtcaatgaccgttgccggcggcaaagtgacaaagacaacttacgattacgttgataaagatggcaagtcaaaacaagatgacaagacatacaacgaaaaaatgaagaaagtttcaaaaacaaatcctaaagaatatattcctaagttgaacaaagaatttacagataaaggtgcagatgtttcaagcatcgaagtcgtatcaggcgcaactcatagctcaaattcatttaagaattacgcacaacaattagtgcaagctgctcaagctggcaacactgaaacaatcgaaatcgacaatggtgctaagatgcaagatggcacatataagttagaagaaaagaattacagccatgactatcgaacagttttcacaatggtggttaaagacggtaaaatcactgaatctaaattcgataacatcaataaagatggcaagtcaaaagctgacgatgctgcatacaacaaacaaatgaagaagattgctaagactgatcctaaggaatacatcgctaagttgaattctgaattcgtcaaagcacaagaaccaggcaaagtagatgttgtttctggtgcaacagaatcatcacacagcttcgtcaactacgctgaacaattagtcaatgctgcacaaaaaggaaatacagcaacgattacagttgataacatcgtttacggtgaataaaacgggacttcggcagtcagctgccaatgaattaatgggtaactgtctgctagaaggtacgatgaagctaggacaagtcaatttgtcctagcttttttaatggaaggaagtccgagatgtcttttaaaacgtttttagaatttgtccggattgaggtcaagacagcgagtgtcttgcctttaatcttagggattgtttattgttggtacgttaatggccagctgaatccagtgacgacagttgtttattttgtcgcccagttttcgattgcattatttgtgactggctttaataatgtgatggattactacaaagcagttgatctggattatcgggcacagacgaatatcattgggcgcaaacatttgtcgccaaccaaggcactgcatttaatgctctattttttattgttcagcatggcggctggaatttggttggtttggcaaacgaatattttattactattaatcggtggcgcctgtatttttgtggccgtcttttacacgttcgggccagttccgctgtcgcggatgccggttggtgaattgttgagtggtgtgacagaatcatttggtgcattttttatcatggtctatgtcaacgtaccaggcgacagcatcatggcgctccattttgattggccaacgtttacccttaaaggtcaattaccaacattgcttagtctatgcctaatcggtgtggttattgcaatccccacttcgaacattatgttggcggataatatctgtgatctagatcaagatcggcgcaatgaacgttatacactgccgcattatttaggaacaacctgggcgttgcggttgtataatacgttgatttggttctcactagtggccgttgttgtggcagtgattacgaaggtcttaccgattgaatcgttactattgttattattgattcctgtcattttacgcaataatcgccggtttaatacgcggcaactgaaggatgtcacctttattaccgcgattcaaaatgcgatggcgatcaatattagcttgattgtcagcttgttattagcgattgtccgcacgacctggtggggataatccaccacattgacagtttggtcaacacatgataaagtaaatgggataaacgtcaattagagaggggcttttcatatgggtgttaagaaagtcgccttagcctgtactgtctgtggctcacgtaactactatgttgctgagaacaagaatcggacagaacgtctagagttaaacaaattctgtaaacattgtgggcaatactcacaacacaaagaaacgcgctaattaggaggaaataagatgattaagttttttaagagtgttggtcaggaaatgaaaactgttagttggccagatgccaaacaaacacgtaaagatacatcaacagtcgtcatgacctccgttttattcgccattttctttggcgttgttgattttgcaatcttaaaagtactacaattatttatcttttagaactggcttaattaagtcggatttgctatactgatggcaagcaaaaaacttcgcgtggtcggagtttttttattttggtatttaaaaggagaattcacatggttgaatcaatcgaaaaaagttggtatgtcttacacacatattcaggttacgaaaataaagtgaaggcaaacttggaatcgcgtgcccaatcaatggggatggagaacaatgttttccgcgttgtggtgcctgaagaagaagaacatgaaatcaaaaacggtaaggaaaaagtcgacatgaagaagactttcccaggctatgttttggttgaaatggtgatgtcagacgaagcttggttcgttgtgcggaatacaccaggtgtgacaggcttcgttggttcacacggtgccggcagtaaaccagccccattattagacgatgaaatcacacaaattttgcgtcaacttggcatgagcacccgtcatttggatgttgagttcaaagtcggcgaatctgtgaagattatcgaaggggctttcgctggccttgttggtcaaattacagaagttgacgatgaaaagatgaaattaaaggttaacatcgacatgttcggtcgtgaaacagcaacagaattagactacgaccaagtagacgaactagtttagagtgcgacttcaggcgggatgactgaaggagcacgtttcgaaaaaagagtgcgtttgaaacggattgactctgagcattaacctaatttggcgaattggtgctacaagcgccgatttgacaaatgtagttaagcgcaagagtcagtttcaaaaagcacgtttcaacaattaaagtagggggctaggatttgtcccaagccccaacaagataggcggctgagacgaaagatgatttgtctcagccgctttttttgaacaatcaatagtgtctatttcgaaagaatgatgtgatgacgatgtggtatatcattgatcaaatattaactgcagtgggcttagtcatttttttgttagtcttactggcaggactggatttttacaaactaatccgggtttcggcacattggcgaccgtgcgcacgtttatatacaaaacaaccaacgctattcattcatggctatcgggggaatcgctattcattcggtcacttactcggacgcctacaaaaagccggaattgctaagaagagcatggtcatttgggtgggcagaaacggtcgattgcatgtggatggagacgcggcgttgcaggctaataacccaacgattcaagtcttatttgctaataaccgcgccgatgtgcaagatcaagtccgttggttagctgcgattattgaacacttaaaagaagcgtatggcgttacgcaagttaatttagtagggcattcgatgggcgcaattacggtgttgcgttatttgttgacatcagaccatgccgtggtggacaaagtgatattgttggcagcgccagttaatgatccatcaattggtccggatacaccacttgttttttggagcgagttaaccagtcgtggaccagttaaacgaacacgtaattataattatttagccgtgcggaccaagtattttccaactgcgatcagtgtcttaaacattgctggcgagttactaggaactaatcgacacgatggttcggtagcagtcgatagtagttttgcattgcgtagcctattaaaaggacacgtgcgccattaccaggagatgttagttcgtggaccgggtggagcacatagcatgttgcacgaaaatcgtttagttgatcaagccattgatgatttcttgtggcgcgattaatggaatcgccttgctttttcggcaattgcttggtatattattaaggtatgttttcatacactagtgggagaccaaatataatggccatcttaaccacatcacggacttaaggaggtatgtttcgtggctaaaaaagtagcaaacatcgttaaacttcaaattcctgcaggtaaagcaactccagcaccaccagtaggtccagctttaggtcaagctggtatcaacattatgggctttacaaaggactttaacgctcgtacagctgaccaagctggtttattaattccagttgtgatcactgtttatgaagatcgttcattcgactttgtaacaaagacaccaccagcagcagttctcttgaagaaagctgccggtgttcaaaaaggttctggcgaaccaaacactaagaaggttgcaactgtaactaaagctcaagtgcaagaaatcgctgaaactaaaatgcaagacctaaacgctgcagacgttgaagctgctatgcgcatggttgaaggtactgcaagaagcatgggattcactgtcgaaggttaattcatgcttgacactttcagtcggattttcaatgaaagttgaaaaatcaagtgggaggtcaaaaaccgttcaccacaattgcaaggaggaaaaccctaatggctaaaaaaggtaaaaattatttagaagctgcaaagcaagtggatgctactaaagcatacactgttgaagaagcaatcgacttagtaaagaaagttgattttgcaaaattcgatgcatctcttgaagttgcatatcgtttaaacgttgatcctaaacaagctgatcaacaaattcgtggtgctgtcgtactaccaaatggtacaggtaagacacaacgcgtgattgttttcgctcaaggcgaacaagcaaaacaagctgaagctgctggtgctgacgtagtcggtgcagaagatttagttgaaaagatccaaggcggctggttagactttgacgttgccgttgctacaccaccaatgatggctcaagtaggtcgtttaggccgtgtcttgggacctaaaggcttaatgcctaaccctaagactggtacagttacaatggacgttactaaagcagttaacgacattaaagctggtcaagtggcataccgtgttgataaagctggtatcgttcacgcaccaatcggtaaggtatcattcgatgctgctaaattagtagaaaactttaaagcgatgcaagacgtgatcatcaaagctcgtcctgcttcagctaaaggtcaatacattacaagtttatcagttagctcaacatttggccctggtgtcaaagttgacgttgctagcttctaagttggtaatgcaaaaagcgctcatccgaaaggatgagcgctttttttgttgctataattaagcattaatgtcgataatttcgaattttgtgacatccactaaacctttatctgtaatccgcaagttcgggatgacgtcgagtggcattgcgccgagcttcataatcggatcgaagtgagcggtgacgtggagtttatcgtgacaaatagcattgaaggccttttgatgttcaattaaagtgtcgatgggttcgttactcattaagccgccgatgacaaatggtaatgttgcgatgacttggccatcccgaatggcaacgccaccgccttggctttctttgagcgcttcgatggcaacgaccatgtcagcatcgttggtaccgactactacgaggttgtggctatcgtggccgatgctggtggcaatcgcaccgttcttgatgccaaagccgttaagcaggccaaccccgacattaccagtgagatgatgtcgttcaactacggccactttagcgatgtcttcgtcaggatgatattggaaatcaccgtctgcagtgtgagcgaccggtaagacgagattttgtgtccgactgatgctttgtaagccgatcacgtgggctttatcgcttgtgaggttgagttttaattggtcagcggtgaatgtatcgaggtgtacggtttgtaacaagtcatcaaaaccagtaactgaatcttcagttgttagtaagtattcgccgctagcagcaactttttgaccatcgatgaaggtttgattcacactgaattgttcgagatcatcaaccaataggaaatcggccttcaaaccaggtgcaatcccgccgcggtcagctaagccggtacattgggcagtgttgatggtggccatttggattgccatgatggggtcgatcccgtttgcgatagcaacgcggatactttcatccaagtggccggtttcacggagggttacggattgtaagtcgtcaccgcagagacaacagaaacgtgcgttttgcggcgtcacgcctttcaaaagggttggcatattcttagagacggtgccgtagcggagataaacatacataccgcgactgatgcgatcgagcatttcatcgacttgggtacattcgtgatcgttacgaataccagcagcggcatatgcgtttaagccttgttcttttaaagcgggtgagtgaccgtcgatgagtttatttgcgttgagtgaaacgagtaattcgtctaaaacgccatcatcagcattgacaacaccgggataattcatgaattcggcaaggccgtaagtgagattgcggtcgtaagaatcttggatttcagcagcggtaatcacagcaccagatgtttcgaggcttggattagcagcaggcacacacgagggcatggtgtacttgatatcaagtgctgtctttttggcagatgcgaccatgtattcaagcccccgcatgccagcgacgttcacgatttcgtgtgggtcggccaagatcgtcgttgtgccatgtggtgttacaagtgatccgaagacagcgggtgagacattggcagattcgatatgaatatgcggatcaatcaaacctggcacaacatattggccgcgtgcatcgataacttttggtgcaaggtagtcgtcgctgataccgaggaagcgaccattaccaatcgcgagtgtgccttcgataatacgaccattgtagacatcgacgatttttgcatttttaatgaccatgtcggcagcttgacggccagcagcttgatcaattagttgttttaaagttgttttatccatgagtaatctcctttatttagcaggtaattcgtgcattgtgaagagtaataataggaataagagcgcagcgacatacataatcggatgcacttttttacctttaccagcagcaatcatggtgatggggtaagtgatcagcccgaatgctaaaccgtatgagatattataggttaatgggacgcacagaataatcatgaaggctgcaaaagaagtttcgaattctgaccagtcgatgttggcaattgacttcatcatgaatgaacccacgatgattaagattggggcagtcacttgcgacgtcacaacggccagtaaaggtgagaagaataagcttaagacgaacatgatggcgacgaccacggcggtgaaaccagtccgaccaccagcagcaatcccagttgatgattcgatgtaacaagcagttggggttgaaccgaaaacggaaccggcaatcattgaggttgaatcggcgaaaagggctttgccgacttccttaggcatcttgttgcccttgatgaaaccagcttgttgagcaagtccgattaccgttccagttgtatcgaagaagacgctgaagaaaaagacgagaattacgacggccatttgaacattgaagacgttgtggatgttcatgattgagacaccgaaagtgggtgctaagcttggaattgaagcgatgatgctgtgaggcattgcgattagaccagtcacgactcccatgatggctgtggccgccaaaccgatgaataaagcgccagggactttgcgggctaatagagcaacggtgacgattaaaccgaagacggtcaaccaaacgtgcggatctgaccaactcgtaatggtgacgaatgatttagcactactgacgacgatgcccccttgttttaatccggtaaaggcgatgaataacccaatcccgacggccatggcggcttttaaattagcgggaatcgcgttaatcacgacttcgcggacttttaagaccgtgacaagcatgaaaaggagggaagcgacgaaaacaccggcaagtgctgtttgccaaggaattcccatgcctaaaacgacggaataggcgaagaaagcattgctgccgagtccgggtgcaacggcgattgggtagttggcgatgaaggccatggctaaacagccgaccactccagttaatgcggtggcgacaaagacggcccccttatctaggccggcgtcgcctaatatagttgggttgacgaataaaatgtatgacatcgcaataaaagtggtaattccggcgatgatttcggttttaatggtcgacccacttgccttaattttgaattgacgttcgaaccagttcgttcgtgattctgttgcaatatcaatatttttatccattatgcacctctgaattagtattttaagaaccttggcattattgtacaacaaaacaatcgtgtttttaagaaaaatgtgaaaaatatttattattttgtaaatatcgttcgtgatttggtgatgaaaagggtttattttatcaaaaaagagccattagcgtgaaaaacgctaatggctctctcataattcgcgattaatttagatggttgctaggacgtgattagcaatcgctaattcttcgttggttgggatcatcaagactttgatagttgaatcgggggtactgatttgacgggcacctgagccgttttcgttcaattcaagatcgatttgaacgcctaaaacagccagcttggcacagatatcagcacgtaaacgggcgtcgttttcaccgatgccggctgtgaaagtgatgacgttcgcaccaccgagttcaacgtggtagctcgcgatgaacttcacagcagaagtgatgaacatgtcgtaggcgagtttagcccgtggattggtagcgcgtgttgattgaatatcgcgcatgtcagcggaaacgcctgaaacgccgagaatccctgatttggcgttcaaaagcgtgatgacgtcatcggcactcttatccaattcgttcattaagaatgggacgatggccgcatctaatgaaccagcacgagtgcccattggaacgccttctaacggtgtgaagcccattgatgtatcgacaggcttaccattttggctggccgtaattgaagaaccgccacccaaatgaagtgtaattaattttaaatcggcaacgggttctttcaaaaagtcagctgttgcttgtaagatatagctgtgactaatgccgtgttcgccatacttgcggatttgatagtcttggctgtattcataaggtaagccataaaaactagtttcatctggcatatcgagatagaattgactatcaaagacagccacttgagggacattagttggtaaaatatgcatcaaggtttcaatgcagtcaacttgcacgggattgtgtaaaggtgcatacttgtcgagttgttttaatgtatctaagttggtgcgatcaataatggttggtttttcgaacgtggtagcaccggcaacgacccggtggccgactgcaatgatgtctgcgggtgaatgaatgatgccattgtcttcaagttgtttcaaaagtcgaagaacaccatcttcataggaaagattagcaatggcgacttgttctttttgaccttggaacttgaaggtgaagctagcttctggtgtgttcatgcgttccatgagcccgcttgccagtaaggttaaatcagattgttggaatagttgccatttcaatgatgaactacccgcgttaacgactaaaatattattcaaaaaactgcacctcttacgattaattttcttgatagtctcaattttaaaccgttttttcagaaaaataaaataagtaaaacgtaatgctaggataactaaaattaagtgccgataatgattgacgctttatggaatccatgctatatttgtagttggttatttatgctaccgaagactcaggtgccaataggcttaatatcctgccgaggaagatacgttgaaatccctctctatgtcttggtggacatggagttttttatttttataaagaactcttgaccacaagttttacaaatctaatggaggtgaatcaattgagcgaaacaatcattgcaaaaaaagcacaaattgttgacacagttgttgaaaaattcaatagtgctgtttctatcgtcgttatggattaccgtggcttaacagtagaacaagtaactgaattacgtaaacaattacgtgaagctggcgtacaaatggaagttgttaaaaacacttacttgcgtcgtgcagcagacaaagctggttacgaaggtttggatgatacattcacaggccctacagcagttgcattttctaacgaagatgttgttgcaccagctaagatcatcgctaactttgctaagagtgctgatgcacttgaaatcaaaggtggtatgatcgaaggtaaagtggcaacacttgatgaaatcaatgccttggctacattaccaagtcgcgacggtttattatcaatgttactttctgtattacaagcaccagtccgcaatgtcgcatatgctgttaaagcagttgccgacagcaaagacgaaccagctgcataatttaaaattgtgtagttaaaagtgttatcaaaaaatattacccacaaaatggaggaaacaaaaatggcattagacgtaaatgcaattgttgatcaattaaaagaatcatcaatcttagaattaaacgacttagttaaagcaatcgaagaagaattcggtgtttctgcagcagctccagtagcagcagcaggtgcagctggcgcagacgcagcagctgaaaaagacagctttactgttgaattatcagaaatcggccaagaaaaggttaaagttatcaaagccgttcgtgaaatcacaggcttaggcttgaaagatgctaagggcttagttgataacgctccttcagctcttaaagaagacgttgctaaagacgaagcagaagaaatgaaagctaaattagaagaagttggcgctgtcgttaacttgaaataatttaaatagagcgcccttggcgcttgtttagattttgagcactaacctaaaatcgggcatcgcggcgatctaagccatgatgcccgatttgtagttaagcgcagaaatctagcgccaatggcacgtttcaaaataaagtgcgtcattaacgggttgtttttgagcatttgcctaatcagccggtgatttgactgatgtagcaaagcgcagaaagcagttaatgaaagcacgttttatttctaaaagaaccccactaatgtggggttctttttttacatatttttttgtaaaacataaatggcgagttgcacaaaataacacgatgctaaatatggattccatatcttaagcgacagccattgctgttgagaactaaaaaggcaatcagaggatattgattgtcgggtgaacgggaatcggattgtgctccgggtaagtaataagcgaaaatcataatctaacagccatctaacataattgtcattttactgtgttttgccttgggatagcttataattaaattaattaagttaaggagcggttgatatgcgaaaatggggcaaacacatatatgaaggaattcagcgacacctaacgttgttaaaaggcatcttcatcctttcggtgatggtctttgttatcctagaagtcggccggattttccgggacttgaacggggaacaattgaaagcgagtttaacgacacaaagtccgtggaccttgctagcgatgctggtgattgggtttgtggcggtcttgccaatgctcaattatgatttcgtgattgcggagttgctgccggaggactattcattctggtataaagtcaaatctggttggatcgtcaatacgtttacgaacattgccggattcgggggcttcttaggtgcgagtttacgggccaatttctatggtaaaaaagcgtcacaaaaagaaatcttaattgcgatttcaaaaattgcgctgttcttattagccggcctgtcaatctggtgtctgattagtgtcgttttgatctttggctttggtattggtgggatgtatgccaactactggttatggctagtgggcggttcgttgtatttccctggtctgatgattagtacgcgctttaaaaatgcggcctttttcaaagatctttcgatgcaacgcgttttacgcctaacattagggtctttcttagaatggggttttgcgggcggctttttcttaacgattggttatttcttagagattaagggtgacttattacaagtcttaccacttttcatgattgccaacatcattggtgttatttcgatggtaccagggggcttaggaacgtttgatttgttcatgatctttggtctgagtgcagtcggcgttcaaaatgcggacgccgttgtctggttgtcattttaccgagtcttttattacatcgtgccgtttttagtcggcgttggtttatttactcacgatgcaggcagccggttaaatcattatttacagggcttacctcggcaggtgatgcaaaaaatcgctcatcacttcattgttttcttcctttatatttcaagcatcattctattattagtagcaactgtcccgaactttgcgattaccaacacagtgattggacagctctacccatacacgttcttcttcttagatcgtgtgacaaacatcattgtagcgtttgtcatgttggccttagcccgcggcgttgccaaccgcgttcaaaaagttttctggccgttgatggtgctattggtgattgcgattaccaatacactatggcgggatttctcaatcaaactcgctgtctttttaacttttgtgctcgtagctagtttcttattgaaacgcgaattataccgtgaacggatcgaattttcatggaatgatcggattgtggatggtgtacttttcgtgggcgccttcttgttatacggctttgttgggattgccaattcgccacacttacggcatcgcaaacccgtaccaacagcgcttttatttccatccgaaagagtctggttggctggttttatcgggatgttggttgccgcagggaccttatatctcgtctaccgttatctcagtcgagggggccgttcaatagcagcgccatatgatgaagcacgaattgctaacgtgattaacacttacggcggcaatgaggtcagtcatttggcatacttacgggataaatcagtttatttctatcaggaagaaggagaagatcaggtattcttgctttatcgtaaaaaagcggatcgcttaattgtaatgggtgaaccagtcggaaatccggctaaaattttaccggcaattgaacagatgatgcacgacgctgatttgattgattgtcatttagcgttctacgaaatttcaagtgaattaacgatgcaactgcatgaaatcgggtttgactttatcaagtttggtgaagaaggctacgtccgtttggcggacttcacgatgactggtaagaaacggcgggctgaacgcgccttaatgaataagtttaaacgtgaaggctatcaatttgaaattttaaacccaccatttagtgccgaattaatggcagaactcaaagcggtttctgatgattggttgggtagtcgcgttgaaaaaggcttctcgttaggctttttcgatgaagcatacctccaaaaagccccaattgcagttgtctataatgccgatcaccaattaattgctttcgctaacgaaatgccaacaggaaccaaagaagtcgcaagtattgatctaatgcgtcacagacaagacgcgccatctggtataatggatgagatctttattaatctctttgaacaaaatcgaacggatggctacacgtacttcaacctcggcatggcgcctcttgcaaatgtagggacttccgagtttagctttattgaagaacgaatcgctcatctgatctatgaatacggctatcacttctacggattccagggattacggacctataagaagaaatatacgacggaatggcgttcgaaatatatcgcttatcaaaaacggacctcattaattttcacgatggttcaagttttaatggtcgttaatcaacgggttgcggatcaaccgcatcctggtggcttgctaggtcgtttgatgaagtcagttcaaattgggaaattttcagataactaacgacaaatgaggaaaaaagatgacagagtattactattctaaaaatccagacgttgaacacgctgagcggcaatggacgtttgaattacgcggctttaattttaaatttataacggataacggggtattctctaaaagcactgttgattacggttcacgggcattgctagcagcggtcgatctgagtgaagcgccagctggtccagtgcttgatatggggtgtggatacgggccaatcgggatgacgattgctaagctcgcaccagagcgccgaatcgacatggtcgatgtgaatgaacgggcattggatttggcacgtaagaacagtgaattgaatcagattaccaacgttactgtattcgaatcagctgaatatcaaaacgtaacggatcaatacgccgccatcttcaccaacccaccaatcagagcgggaaaagatgtggtgcaaaatattttgactggtgcctatgatcacttattaccagatggtgaattgaacgttgtgatccaaaagaaacaaggtgccccatcagcgaagaaaacgatgatgagcatttttggcaacgtgcaaattattcacaaggataaggggtattacattctccaaagtattaaattaaagtaaggaccggggttgaaagcggtaaattcaggcgaattgtgctaaactatgattaaagtacaaggaggttgatacgatgaaaaccagatataaaattttaatcggcgtaggggtgactgcagcagttggcgcaacgaccgcttttgtcggttctaaggcagtaatcgataaagtatcgcgctatcgcaaacgattagcagttaaaagttttgtaaaagacaaattacatggtaatcaaaaggcgttagagttggtcgatcaactctccgatgcggatgtgaataacttgttgactgcggcagacaggttaacccaattaaaagataagctcggagaacacgcagacaatctaccagatatgatggatgatttgcgccaaacactaatggcttacgcaacaaaggtgaaagaaaaactatagagtgcgactcgagttggtcaggctttgagcattaacagtgaaatgagcattatggcagtccttgccataatgctcattttgcagttaaacggaagaggatggcttatggagcaattaaaaatggtatcgacaatccgtcggcaccatttttaattgctcgactagcgcgactgtgttttaatagttgagaagtaaaataaaggggcgactaacgcgtgagtgaaacacaacaagagatcgatcaatggatgcaagccgccatcgatgaagctaaccaagcacgcatcattggcgaggtaccgattggcgccgtgattgttaaagacggacaaattattggacgggggcataacattcgcgaacacgcgcaagatgcgacgttacatgctgaaattctcgcgattcaagaagcctgtatggttgaaaagagttggcgtctggaagataccgcgatttatgtcacgttagaaccatgcccaatgtgtgcaggcgcgattatcaatagccggattcccaaagtttattttggcgcgagtgatcctaaggctggtgtgaccggcacgttgatgaatttattaactgacaaacggttcaatcaccaagctgaagtggttggcggggtgcgagaagctgaatgtgcgagtttattgcagactttttttagaaagattcgcgaaaatcgccgtaaaaaaaagaaaatggctggtaattaatgcttgaatcaggtagaataggaattgccgaaaggccttgagacaatgatgagcctacgaatcgtgtcaggttcggaagaaagcagcactaagtttgttttatcatgtgtcttaagttttgtgaaaattaaccagacccaacggacaattaattttgtcggttgggtcttttttcatgcaacgcaatcaaaattgacggtaaaatatgctaaaatggaacaagtagttttaaatgaatcggactttaaattgcaaaggtggaggtcattaaatgagctatcaagctttataccgggtttggcgcccgcagcgtttcgatgacgtgattgggcaagaaacaatgacccaaacattgaaaaatgccattatgacgcaccaaacaagtcatgcttatttatttacaggcccacgtggaacagggaaaacatcggctgccaagatttttgccaaggcaattaactgtcattatcaaaaagatggcgaaccatgtaatgaatgtgagacatgtcgggccattacggctggcgccctcaatgatgtgattgaaattgatgcggcgtctaataatggggtcgaagagattcgtgatattcgggataaggccaaatatgcgccgacccaagctgattataaaatttacatcattgatgaagtccacatgttatccactggtgcgttcaatgcactgttgaagacgttggaagaaccaccaacaaatgtggtattcatcctcgcaacaacggaagttcacaaggtgccagcaaccatcatttcgcggacgcaacgctttaattttaagcggatcacggccgctgatttatttaagcgaatggcttatattttagatcaaaaggaaatgacctatgatccagcagctctgaaagtgattgccaaagctgctgaaggtgggatgcgggatgctttaagtattctcgatcaagtgttatcctttagcgacaatcacgtcacgttggataatgcgttggatgtgacaggcagcttaaccgaagcgttgttggcggattatgtccaaacaattcaggataatgcgcctaaacaagcgttgcaattgttgcaacagattttggctgaaggtaaagatacccaacgttttgtggaagacttaattgaatatgtgcgcgacttactgttgtatcaacaagcacccgaattagtcgccgcaagtgaaatggatctattggatgaacacttcaaagcgctcagtgcagcgatgccggctgaccgtttgtacggggtgattgatatcctgaatgaaacgcaacagcaattgcgtttcacgaaccatccagaaatctatctggaagtcgcaacggtccgcttgacgcaagtccagacagcccaagtaacgactacgatggttgccgcaccagctgctgataatgaacaagtcgcagcgttgagtcaacaagttgcacaattacaagcggcgttacaaaaattggaagcggcgggaccagtgagtgctccagctgccaagcctgctaagaagattagtaaaaaggtcaaccgtaaggcgatttatccggtattggcagatgcgacgcggaccaatttggagaatctcaaagaagtctggccggatctgttgaatatgttggacgttaccaagcgcgccgtgatgaaggtttccgaaccggttgcggcgagtcaaagtggcgttgtcgtcgcgtttaactacgcgattttattcgagcgagctagcaatgatcaagatcttttgaacattttagaaaacggcttgaatcgtttgactggcaaccccttcaaggtggttttagtgccccacgatgtttggccagaaattcgccaggaatatttacagaatcacgcagtaccaagtcaacaggtaacaactgatgacgaagcagaagcaacgccgaaaccagaacaaaaaccggccgttgtcgaacaagcacaagctttgtttggcgatgcggtggttgttaaaaaagattaacgtttaaatttgaaaggaagtaatgaagatgcgcggaatgggtaatatgcaaggtatgatgaaacaaatgcaaaagatgcaaaaagaaatggggcaaacacaagaagccctcaacaatacagaatttgtcggcaaagcagccaacgatttagtcgtggtcacaatgactggcgacaagaagatgaaagacattgccattaaaccagaggccatcgatccagatgatgttgatatgttacaagacctcattatcatggcaactaacgaagcgatgactgaaattgataaacaaacacaagcccaaatgggtaaatttactaaaggcctcccattttaagtgagacattaaggaagtgcattaatgcaatatccagaaccaattgcgaagctgatcgaaagctacatgaagttacctgggattgggaacaagaccgcaacccgattagctttttacacgattgatatgaatgaagacgatgtgacgaatttcgccaagaacttaatttcggcacgtcgtgatctgcattattgtagtgtctgtggcaacattacggatgaagacccgtgcgaaatttgtcgcgatacaacgcggagtcaggacatgatcttagtggttgaacaaccgaaagatgtcatgtcgatggaacggatgaatgattatcatgggctctaccatgtcttgcatggggtgttatcaccgattgaaggcaaggggcccgatgatattaacatcgccaatttgattaaacgattgcaaaaaacaccggctaaagaagttatcattgctactaatgcaacacctgaaggggaagcaacggcaatgtatatttcgcggttgattaaaccagctgggattaaagtgacgcgtttggcgcacggtttatcagtcggtagcgatattgaatacgcagatgaaatgacgttgttaaaagcggttgaagggcgtcaagaaatttaagaatggtgggtttgcgatgtttggtagaaaaaaaccgacattaaaacaattaggtgatcaagccttattggatttagtgtaccaagtcaaagataagtggcagatggcccaaaagacgcaagacaacgtccgcggactcgatgaccaattagagatggaaagtaagattcaacaagcaaagtttgaattcttattccgccaagcccgccaacgtaaagtagcaggtgaagcagtttcgaaagaagcagcaactagaaatacatttagatagcgcgggcattcagatgacagccgcagcgtgaagacaaggtcgagtgactttgtctttttttatttcaaacgtctactgtcgcacgctaaacgcaagaacataaccgccggatacgcactcttccctttacgtcttttgttgaatcaagtaaaatggaagtaactctatggatgaagaaggttgttttgtggtaggaaaattaattacgtttgaagggccggatggtgctggtaagacaagtgcgttgatggctgttgtaccgctacttgaagccaagtgcaaccaagacatcattgttacgcgcgaaccaggtggcaatccgattgccgaaaagattcgcaatgtcattttagatgttgaaaatacggcaatggatgaccgcaccgaagcactgttatacgctgccgctcggcgacaacacattgttgaaaagattgaaccagcgttggctgataacaaaatcgtgatttgtgatcgatttgtggatagttcaatcgcttatcaaggggcaggtcgtggcatcggtgaggaagccgttgcgcaaatgaacttatttgccactaatggattagcgcccgatttaacgttataccttgatgtaccatctgaagtcggtttacaacggattaaacagaatcgacaggatcaatatgatcgattggaccaagagaagttggcttttcaccaaaaagttcggcaatcctacttacaacttgcgcaagataatccagagcggattcaaacgattgatgcgaccgcagacttagacatagttgttgccaaatgtctgcaagtgattgaacaacgatatccagacttattcacagcatagaaaaggggagattgaaatgaaattacttttagcaattgttcaagataaagatagcaacttattaagcagcgaattaatcgatgccaacattcgggcaaccaagttgtcaacgactggtggcttcttaaaatctgggaatacaacgtttatcgtcggaattgaagacgaacgggttcctgaagcgcttaagattattgaaaaaacgtgtcaggcacgcgaacaattcatgacaccgcctgttaatatggatgccacgatggatagctcaatgtcatatccgattgaagtgcaagtcggtggggcaaccgtctttgtgatgccgattgaacagttccaccgcttctaatcgatggccagtttaacaattgaacagcttcaacccaaacttgtggcccagtttgcccagattatcgcgcgtggacagatggcgcatggttatctattagctggtgcacagggattggggaagacacaattggcacagtggttggcactgcgtctgttctgtcaacaagtgacaccagatgggcaaccttgtcggacatgtccggaatgtcagcggattttgacgcataatcatccggatgtcattgaaattaagccggaaggtaagagtattaagattgccgatattcgctatttgaaacaagaagtggctaagagcgggatggaatccagtcaacgcttattcattattgaagctgctgaaacgttaaccgccagcgcggctaatagtttgttgaagttcttggaagaaccggcgcaaaatgtttacgcgattttatgtacgagtaataaaaatcaaatgctccccacgattttatcacggcttcaagtgattgatctggcagcattggcaccacaaatggtgcaacaacagtttgaagcagctggtattttgccacaacaagcgcagttattggtgtatttgacgagtgacttaactgaagcacagaccttattggcggatgattggctattacaagtcagtgcgaagcttgccgcgtgggcacaaaaagttgaacaacgtgatttagaagcatttgtgcagattcagacgcaaattttaccattattagttgatcgccaacagcagaagacctttttaactttggtgggcttatggtatcaagatttattgaattaccgctatgaattaggcgccacaccttgttttggtgcgtacgaaagccagttaaaccaggccagcgccgcgttgactaccacgcagttggtcgctcagacggaatatgctttacaagcacaacgcatttttgaacaaaatattagttgccaaaacgtcttagagagtttaacgttaaagttaattgcatagtaaaacgcataaccagcgtatcgggaggatatcaacggtgagtaaagacttatatgaacagttatcagacattgaacagcaagctaaattgacgtttgaggggctcagtgaaatgaaagcagtccttgccgaagtccttgagaaaaacgctgaattaaagattgaaaacaagcacttgcgggaacatttgcaagaattggaaccatcagccaccccgcaaacgggtaaggaaggggctcaagccctttcgaaatcaaaacaaaacttacagaatctttacgaagaaggcttccatatctgcccgtatttttatgggtcacgacgcgaaaataacgagccttgcgcattttgtaatgatgtcatctacggcgaacgaacaaacgattaaaaaaggcagggcaaaagggatgcttacttttggcctgtctttatgtcattattgatgcatcttgaaaggatagaacatgcaaacacaatcaagttttaaaacgacggaaacgggaactttatttttagtaccaacccccatcgggaacttaggcgatatgacttaccgggcaatcgatacattgaaatcggtcgcactgattgctgctgaagatacacgaaatacgcagaagttattgaaccactttgagattgaaacgaaacaaattagtttccacgaacacaatacgcaacaacggattgaaacgctgattgaaaaattagaagccggtgacgatattgcgcaagttagtgatgcggggatgccatcgattagtgatcccggtcatgagctcgttaaagcttgtattgaagcgggcatttcagtggtgccattacctggagccaatgccgggattacagcgttgattgcttcgggcatcacaccacaaccgtttacgttctacggttttttgcctcgtaaaggcaaggagttaacggaagccgtaacgacgttggcacaaaagcctgaagcacttatcttctatgaagcaccgcatcgtttgaaaaagacgttgcaagctttgctcagtacgtttggcgccgaccgcaaagtcaccttggggcgcgaactcacgaagaagttcgaagaattcattcgtggcgacctagaagaagtgcttgcttgggcgactgaaacagaattacgtggtgaatttgtgatgatagttgctggaaatccagcaccagatgcaacggtcagtgcagttgcaacggaatcgctatcccttcctgaacaagtggaagcccagattcaacaaggagcaagccccaacgtggcgattaagacggtcgctaaggcaaatggcttgaaaaagcaagtcgtttataatgcctaccacgaattaacagaatagaggtcacgccatgccaggaaagcaatattcagaaaactatcaaattccgtatttcgaaacggatatcaagggcgaattaacgcttgcatccttggtgaacattttaattttagcatcagagcatcaactcaatgcgctcaacgtcggtgaagcgacaatgcatgcgctcaatcttggttgggtggtcacgcagtatcaaatgaagattacgcggatgccgaaggtggatgaaaaagttaaaattgtgactgaagctgagagttacaacaagtatttctgttaccggaatttctggttatatgatgaagccggcaacgaatgcgtcttcgtccaaagcatcttcgtgatgatgtcgtatgaaacacggagtatggtgcaagttgtgccggaaatcatggcaccattcgagtcaagtgagattaaaggtagcaaacgattcccacggattaagaagattgatcccgaacaagtgacgaccaaagaatatcgtgtgcgttatttcgatattgatggtaatcaacacgttaataacgtccattattttgaatggatgttggatgcgctcgattatgacttcttgacgacacaccgcgtagcaagtgtcaacatccgctacggccacgaaattcaatacggtcaaatgacccaaagcatggtcgaacaactcacagttgatgatataatcacaacacggcataaagtcgccgtggatgacctaagtgcagcagaagcggaaattacgtggaaagagcgctgagtcgaacgggttggctttgaggattaacgggataattgggattatggcgggtcttagccataatcccaattattcagttaaccggaaaaggcagttcgaggaagcacgtttaaacgaaagaaagccccattcacagataaagttgtgatgggctttcttttgttatcttcgaatatttattgaaacgtgctttttgaaacagctccctgcgcttaacccaatttaccaaatcggcgatttcatcgccaattcggcaaatccagttaatgctcagaagctaaccgtttcaaacgcactctatcgaaaatgtgttttcatcaacagcttcctgcgctttgctacacttatcaaatcggcgcttacagcgtcaattcgctaagttaggcaagtgctcagaagctaaccgttgatgacgcactctatgatgttgcgttgctgacaaattcttttaatgctgcgcctgttttgcctgcgctgaggccgacttgtagtttgaggcgtgcttttggtccattgaggccttggcagaaggtgacgcccatttgtttaagctttacaccgccgccttggtaatcgtagacgtcttcggcaatcccgttgaaacagcgagaaacaagtacgatggggatgttgcgatctaatagcgcttgaacagcgggtaaggttgctggtggtaagttaccagccccgagtgcttcgataacgagccctttggtgttgggttggttgatggcgtcgaataaagtcccatccatgccagcgtatgcttttaaaagataaacaggttcgacaagggttttgatgtcgcaaatttcagaacgaattaattcttggaagaaattcgcattgtgtttgctgaccaaaccgatgggaccaaaagttggcgttctaaaggttgcgacgttcgtcgtgtgcgtcttcgtgacataccgtgctgtgtgaatctcatcgttcatcacgactagcacacctttatcatgagcatcgtcagaagcggctgtccaaacggcactaatcaagttgtgtaatccgtctgcgccgatttcattcgacgagcgcatcgcaccagtcacgacgacggggatattgttgggaagtgtcaagtctaagaaataggcggtctcttcgagggtatccgtcccgtgtgtgacaacaacaccatcaatcccgtcttcttcagcttgttgaattcgattcttaaggtttaacatcacagcgggtgtgatgtgtggtgaaggaagattggcgaactcttcactttcaatgattaattgattatcgaacagctcttcaaagccggccattggattttgatctgtgggtgcaaccgcgccatcttcgtccgcagacattgcgattgtgccaccagtatggaggactaaaattttcttcatgtttaatgaacacctttctttaaatccgaattactcatctgtaagtatagcaaattttctgcaagagttgctgaaaaacgaaaataaattgcttgtaattaaataacgttagtgatacatttaaggggttctaaaaattcggagtaggactgaagcgttaagtgctggtggaacggaatgtgaacaccagacgaaaagcagcaatgcttgcgatttcagtaccgcattcgccgcagtattatttgtggcagctccaaaagggagatgctttttatggttaatggtcagatttttggtgttaagctagacactagacgcgttgttttactagctgttttaattgctttacaattggtggttgcacgctttgcaatttcactaacgattttcagaattagttttggattcatcgtcaccgccttaatggggtggtggtttggcccagtttgggcgggacttgccgccgttattggcgacctcatcaatagtttgatgattggggtcccaggtggttatttcccaggcttcacactttcagcgtttctaggggctttcatctatgggtgttacttctaccgacaaaagattacatggtggcgcgtgattgccgccgttgtgacagttgtgctaatcgttaacctcggtttgaattcatggtgggtgtcgattattagtcatacaccatttgggttccactttacggcgcgggccattggggaagctgccacattagtgattcatccgattattctatacatcgtgatgcatttcgaaccgattattagattaaaagatagagtattataaatgagtaggtgttatctatttgaagataacgcctttttttgtggaaaccggctttttatgctagaataacaaggattataagcagaagaaggatgaaataatgaagctattggcaatggatacctcgaatcaagcggtgagtgtggcactccttgaagatcatcaaattttaggcgaaatgactgttaatattcgtcaaacacatagtcagacgttacttccaatgattgatcaactattaaaacaaacaaaaaccaccattgaagatatcgatcgctttgtcgttgcagaaggtccgggttcatacacgggattgcggattgcggtgacaacggctaagtcttttgcttggacgcttaataagtcattggtcgggatttcgagtttagcattgctagcggccaatgtgatggatacgaccgccttgattgtaccgctgtttgatgcacgccgcgacaatgttttcgcggggatttatcagtggcaaaatgggacattgcaaaccgttgtggccgatcaacacgtttcactagaagcactactggcacaattacaattattggcagaacctgtttattttgtggggaatgacgttgcacactttaacgaacagattcaagctgcattaggtagtaacgcgcatttcgtgtccgccaaccataatttaccgcacgccagcgtcttgggtgaattaggcttgatggctgaacctgtcgcggatatccatggcttcggacccgtttatttacgcaagacggaagcagaagttaactgggcaaaaacgcatgatgagcgaggcgctgattcgtatgtggaacaagtttagggaatacctcaaaccccagatttgggtcaagaaagaaatgccttacacaactcggcgcgttgaaattgatgagacgacattttacttagcacgcgcgagtcaaaatgatattacggcattgttggacattgaacggtcggtctatgccggtcagacgccgtgggatcgttggaccttcactagtgagttgagcaagcgcaagacatcgttgtatctggttttatgccaagggactgaagtcgtagcgtttgtcggtgcatggttttcaaccaatgaagctcatattacgaatatcgcggtgcggccaagttatcaaaaacgtggtattggccactttttggtgcacgaaatggttagtttagcccacgattatcccagtcaaaaaattacactagaagtacgcgccagcaacacaagcgctcaagccgtttatcagcgattgggttttacagtggtgcggacgcgtcccaattattacattcaggaaaaagaagatgcattcagtatgtgtcggatattgagtcaataggagtcagtcatgtcggaaaaacgagaattaattttagcatttgaatccagttgtgatgaaacgagtgtggccgtcatcgaagacggtcatgttattttaagcaacatcattgctacccaaattaagagtcatcaacgttttggtggggtggtacccgaagtggccagccgccatcacgttgaacaaatcacagtttgtacacaagcggctttagaagaggccggggttacttacgctgatttaacggcggtcgcagtcacttatgggcctggattagtcggcgccttattaattggcgtgacagctgccaaagcgattgcttacgcacaccacttaccattgattccagtcaatcatatggcggggcatatttatgcggcgcggtttgttaagcctttagaatacccattgttagctttactggtttcaggtggccatactgaattggtgtacatgccagccgccggcgaattcgaaattatcggtgatacacgggatgacgcagcaggtgaagcctacgataaaattggtcgcgtcctcgggattcaatacccagccggtaaagaaatcgatcggcttgcccacttaggtcaagatacatttaaattcccgcgtgcgatgctcaaggaagataatcttgacttcagctttagtggtttgaagagtgccttcattaacacagtgcaccatgccgatcaaatcggtgagacgctgaaccacgaagacttagccgctagtttccaagcgagtgtggtcgaagtgctcaccactaaaacgatgcacgccgcgcgtcaattaaacgtgcgccaactcgttgtggccggtggggtggctgccaatcaaggtttacgtgaaggtttggcgacagccattaaggcatccggaatggatttagacctcatcatgccaccacttcgattatgcggcgataacggcgccatgatcggggccgcagcgcatatcgaattacaaaaacaacaatttgctgatctaagtttaaatgcagtccctggtttggattttccatacggtgcataaaatacgaattcaaaaagcctgtcgataatttcgacaggcttttttgcttaaatggattgcttagttgattgtaaggtagtatagatgtccgtcggcagtgccactatcaacggactgagctgatccacgccaatcagtgttaaatcgtgcatagcacgtgtgacgagtgtgtagaggagatctacgtctgattgtgcgccgaaggtcttcttagagatgtcgtagccaatcacagcgtcgaactcgagccctttggctaagtataatggaaggattaggatgcctttgggtaaactacgggttgtttcaccgatgagtgtgacgtgttcatcaggtgttaaactagcgtagagttggtgggcaacttgttggttcttggtgaggatcgcaacggtcgcgtgttctgcctggagatggcggatttcttgggtcagtgtagcgagcgcttggtcgtttggcgtctcaatgacgcgcggtaggcgcccgtcacggctaaaggcttggagggctgtttcttttggcaagagtgccttggcgaagttggtgattggggcggtcgcgcggtaactcttggttaagctaatttggttgatttttaagcggggaaaagcagcggtcagttgatcgatgaagtggccggtttggtaggtcgccgtgaagacatcctgtgcgtaatcgccgagcacggttaatttcgcgttgggaaaggcgtggtggatgtagacgaactgagcgatgctgtaatcctgcatttcatcgatgaagaggtactgaatgccgtgattttggccgctgtcagttaataagtcgcgcaggtatagaattggggcggcgtcactgagcccgacgatgtggcgttcattgttatccgcgacttggcgaatcatggcgtcccaaaccttcgtagggatgtcggcagggcaagcaccacttaagaagtgttgatattctgtggattcatctaggaaataatcattgtagattgattcatagagtggggcgaaataactttgaacgatttcacgagcgatgaaagcttgttcatcatcgccagaatcgaattcgcggtcaccgacaatcgtccggtaagcatcatcggttaaggtatcgattttttcagcgacccagtcgagatgaacttcgaggttgatttggcgtttaagccgtttgatgagcgtgtttttagtggcgaggaatttgtcaccgggtaacatatttgcggggagcgcgagataaatctgattcatctggtctttagtaaaaaatgggcggtcttcgaagtatagatcgttgaatgccaacggttgggttgaggcttgtttaacgtaagcttcaattgcgtgcatgaacgctgcgctttctttataccggcgcatggcttgtgtcatttcaggaaaactggcttgatctttttcgaagcggtcgaagaggttctcaacctgtaagcctgagaagcgatgacttaagaactcggccatcgtcacttggcgcatgtttttctcgcctaaactaggcaggacttctgaaatataatggctgaataaacggttgggtgagaagagcaccatttggtcggcttcgagctgactgcggctgtgatagagtaaaaaggcgatgcgttgcaagacagctgaggttttaccactaccggcgaccccttggacaatcagtaagtcagcggttgtatcgcgaatgatatcattttgttctttttgaatcgtggcaacgatgttttgcatgtattcgtcactttgttcaccgaggacggcttgtaagagttcatcgccgacagtttcgttcgtatcaaagacgtgttcgatttgaccgttttgaatcttgaattggcgtttgagtttgaggtcaactttgacagggccatttggcgtctcataagttactggaccgagtgtcccattatagtagatactcgaaacaggggcgcgccagtcgtagattaagaaattgtcttggtcgtcgataaaagtggcggtcccgatgtagagtgattccgtttcaccatcttcggtgatgtcaatccgaccgaagtaaggggagttgacgagatcggtcaggcgttcttgttggctagtcagtaatttttcgttttcgacagcggcggcgaccaattgcttttgttgttggaccgcggcgttggtttccatgcggtcatcgacttcggtaatgttgactttcgtattgtcgccgtaacgttgttcgatgtctttggtttcattgtaggcgttggccaattgttggttaatcactgtgaggcgttggtcgacctgtataactgtgcggtcaacgcgcgcttgttcttgttgttttgtgtcttcgtgtaacatagcagcctccaattgttagttgttatattataagcgtcttggggtaaaaaagcgaccgattgacattcattttaaaatccgttagtatgacagtaattcaacagacaaagtgaaggataagtagcaactgatattttcttgaacaggaagcggcgggactgagaagtcgtcaaggagttggttgtgaattgggccttcaatcgggaattagtgagtaactaattcgggtagcacccttatcgcgtgagtggcacggatgattttcgtgcaatttaggtggtaccacgtagaggcgtcctaattgtttaatcacaattaggacgctttttttgagttgataaatcaaattggagggtattattatgaacaaaaaaattatcttaaccggcgatcgaccaaccggtaaattacacattgggcattacattggttcattacgcaaccgggtagcgatgcaagattcaggcgaatacgaaacatttatcatgattgccgatcaacaagctttaaccgataatgcgcgtgatcctgaaaaaatccggaacagtctcttccaagtggctttggattatttatcagttgggattgatcccgctaaaacaaccgtcttcgtgcaatcacaaattcctgctttgagcgaattaacgatgcattatttgaaccttgtgacggtttcgcgtttacaacgcaatccaaccgttaaagctgaaatccaacaaaagaattttgaacaaagtattccagcgggctttttaatttatccagtcagccaagctgctgatatcacggcgttcaaagcaacgacggttcctgttggtgatgatcaagaaccaatgttggaacaaacccgtgaaatcgtacggacgttcaacaatgtttatgacaaggaagtattggttgaaccagaaggggtcttcccaccaaaaggcgaaggacgcctacctggtttagatgggaacgccaagatgagtaagtcattaggcaatgcgatttacctatcagacgatgcccaaacgcttgaaaagaaagtgatgtcaatgtacactgatccattgcatatcaaagtaaccgatcctggtcacattgaaggcaacacagtctttacctatttagatgccttcgatgatgatcgtgaaaaagtggctgaactcaaagcgcaatatcaagctggtggtttgggtgatgtgaagatcaaacgttacttgaacgaagtcttgcaagcgaagttcgcacccattcgtgaacgtcgtgctgaatttgaaaagaatccagaagccgtttataaaatgttagaagaaggtagcaagaaggccaatgctgttgcagaacaaacccttaaagaagtgcgggatgcaatggggattaattactttaactaatcctattcaaattaaaaaaacagttaaacaagtcgctgaatgacttgtttaactgtttttttatagactaatatagtgggataatagatgctttttgatggtactttaaaggtgaatatgagagacttaattcaatttaagacagatgtaaacgctgtttttggtgtataatttgagaagttatcaacatggagcaaaggagaattgatatgcatgatttaactaaaggtaatccgttgaaattaattatcttatttaccggcccattattgattgggaatatttttcagcaactctatagtgtcatcgataccttaatcgttgggcggacaattggtgttaatgcgttagcagcagttggctcaacgggtggattgaacatgctgattatcggtttttgtacagggaccacggctgggttgtccatcttgacagcccaacgctatggtgctcaagactatcgcggcgttaagcgcagctttgcgacgagcattctgattagtttggtgataaccatcattttgacagttattagtctattatttgctcgacatattttggtcatgatgaagacgccggccagcatcattgttgatgctcaacggtttattatgattatctttggtgggatttttgcctcgatggcgtttaacttactttcgaatatcattcgcgcacttggggatagtcgaacccccctctttttcttagtaattggggtcattgtgaatattgtgttagattttatttttattttaggctttcatatgggcgttgaaggggccgggtttgcgacggtctctgcacaaataattgcggctgtgttatgcttactatatatttatcgccgcattccggtcctcgttttacggccgaaggattttcgcgtgacgcgcaaagatgtcatggatcatctcaaggttggattaccgatgggctttcaatcgtcaattattgcaattggctcaatcgtgatccaaatcatgttgaatacattgggtgctagcgcggttgctgcttacacagcggctgggaagattgatcaattagcaactcaagttgggaattcatttgggattaccttggcgacatattccgcacaaaattacggtgcacgtgaatttggacgaatcagtaaaggggtccgccagacactaatggtgtcaatcatctttagtttagtgatgggcgcgttgatcattgcctttggacgaccactggttaacctgtttatcgggaacaatcaaccgcacgtgacggatttagcacaaatctacttccgctttaacagtagttgttactttattttggcaatcttatttgccattcgctacaccttgcaaggtttggggcagagctttattccaaccttagcggggattgcggagttgttcatgcggatttttgccgggatcttcctcgtgcagcaattcggcttcatgggcgcaagtttagccaacccactcgcttggattggttcatgtttggtgctattgagttcctatttcaagacaatgcaccaactgaagcgtcgtgaagcaggtaagaatagggaggaacaggatgtttaaaaagtatttattggtcggcttatcgttgaccatgttggcgttgggtggctgtcaggcgacacaatctagtcaaccaacgcacgagaatgcaccaacaattgcaaataaaaaacaagttaaaaaaacaacggcaatcttggctgagaagacctttaagtcaggcgacaatgcctatttagaagtgaaccataataaatcaacgttggatgtccgtcaatggcaaaccgaacggatcaagtatggtgcgttggatggtttaaatcggacaacgactaatacggctttcttatcgaaagagacgttaggccgttcaaacacacgccatcgtcaaacgtggcaaccaaccggctggcataatcaacccgtgatgattgatggccaacgggtctttcctgaaagtcgcggccatttgattgcatacgcgatttcgtttaatttcaaccgagatggtgttttccaaaaaggggaactcggcagtagcaataatccgaagaacttagcgacacaaacggtcttcagcaatcaacgtaccatgcagatttttgaagaccaggttcgccaagcactaacgcaaaataaaaaggtgatttaccaagtgacaactgtgttccgtggagatgaattgatgccccgcggttactgggttcaagcaatctcaacagataagaagttgaactttaatgcgtatgtttggaatgtacaacctaagatgcaatttgactatgcaaccggtcgcggccattacgatggatcgatggcggtggtggatcagtatgcaggcaatccttatcagaattaagtagaaccaaaaaaagcgccgtctcaagattaattgagacggcgctttttttgcttaatgcacaattactacttacttagaaactaaccgttttaaacgtactttaaacatgcttcgatagccataaccttccggttcactacacaacaaaaatcatggccggaaaccaccataattcctggtgataggctaatcttcaagtgataaacggctatctcagcactttatggcaggtcattgcctgctgccaagtataggtcgtaccattctcttctggtgagggtgactttgtctgcttcgcagatttgtgctaggcggccggggttcattgtgccgacaacgacttgcatgctggctggaattctgaggagccatgcgctagcaattgcgttgacgttggtgtcatgtgccttggcaactgattggagtgctgcgtttaattctggaaatttcggattatcgatgaagaccccttcaaacatgccgtattgataaggactccatgcttgaatggtcatattcgtgaggcgtgagtattctaataaaccaccatcgtgatgaatgctgcgcgcgtcttgcatattggtatgcacgccggcatcaatcataccagtgtgcatcaaactgaattggagttgattagcaatcaatgcttgcggcactgcttgttggagtaagtcgacttgaccgggattgaagttgctgaccccgaattggcggactttaccactattttgcaattttaagaaggcttcagcgatttcatccggttccatgagtggatcaggtcggtggagcagtaaggtgtcaacatgatcaagttgtaatcggttgaggctggcttcaacaccttcgatgatgtgttcctttgaaaagtcgtacatttttttgccaatgccgactttggtttgaacgagcacttgatcacggtcaatatgactggccttaagggcgttcccgaatttaatttcggaagcaccatcgccgtaaatatcagcgttatcaaagtaattaattccatgttcataggcggtttcgagcattgtcagggcttcttggtcgctcagttgtgggatgcgcatgacaccccagacaattggcgaagccattaagccgctgccaccaacattgattttttgcactatcaatcactccttttatttgatgcttttaacctaccacaaagtaccattaatgaaaagaaaaggctttcctgaatttcaggtcgtcactggcgacaattttcggtatactaatcacaatagacaggagacagttagatgacagataagaaagcacaggcaccgcggctaaatccacaacttgagacggtacagcttactgcgtttgaaccagatgagacttatgaaggtttgtttttcgaagaactaacgttgaagcaaaccgaagttgagatgttattctttaaaggctgtttatttaaaaattgtcagtttgaacaagtcgactttaataactgtgattttcaagatgtgcaattcgaacactgcgcgttgttaaactgttcgttgacgaatgatcccttccaacgagtcgcgtttaatggttgccagttgattggttccgattttgcagaggctggtctgaatgatgtcacgttcgacacttgccaagcggattacaccggctttaactttgcgcggatgcggcatgtcgactttaaagattgcagtatgcaagaagtctcactcgggcaagttgattggcagtggctaacaatgatcgggaatcgtttgaacggcatggatatgactggcacgaatttgaagaatctcgatatcagtcagaatcaattcgaaaaagcgactttcacgctcgaattattacgtggggcgaccatcagcacagaacagacgctcgtgattatgagcgcgttgcgaattaacgtccgctagcttgccggtttttaaaggcaattatcagacaactgattgttgcgatgagcatcacaagcacagcgaagaaatcttggtgcaacagctggcagaggccgctgatacataaagcgatgaataaaataagtgggattttaaggttggctttcattggtcattcccccgtactttaatctgaaaaggcagcgacaaaatattgtggctgccttttcgtttgatttttaataattaatcttgtatgtcaattcaacaaaatgaccgatttgacggctattgataagttccaatggcatatcggttaagtgcgtgctgaccagtgaaatgccgtcacccaggagaactggcgcaatggtgatgatgagttcatcgactaactgggctttaagcaattcggtaaagatttctgcaccacccacaagccagatattgccgccatcttctttttttaattgacgcatgaactcaggaatattcccagcaacgacatgtgttcgatcttctgtatcatgtaacgttttcgagaagacatagccgtttttatcttggtaaggataggtgccggctaatttaagactttgttcatatgtcttacgccccatcacaacggtatcgacggtgcgttggaaagcttgaattgcagcgtctgattcggatgaatcgagtgcagctaaccaagcagtgctaccatctttttcagcgatgaagccatctagactctgagcaaggtataaaattacttttcgcgaatttggttctgtcatagtcaacacgtcctttaaattaagattacctttattataacagttttaaccgctttcatacattctaaaccgttggtaatttaactggatttggcttatcatgaaaagcaaagctgtttactcaaaggagaccaaaaatgacaactactgaattttccccagaaatccaaagtttaattgaccaggttcaaaagaattatcctcaacccattaagatccgggtcgcagacgcagcgtctgggatgttaaaacatgatcaggcacaacgcgttttaaataacgatggcagcttggcaatcttaattaccgatgcgacagcggccgattatgctttatcacatgaattattacacttactattattatcaatcggttttccacaaatcatgaccgatgtcaccacgcaggatgcgcaactcgatgaacaattggttgcgaccggcacaacgttgtacaatgctgctgtgcatatggtgattcaaaaagaacaagaatcccatggctttgtggatgttgaaactaaacaagcctaccttgaaggtctacgagataatctgaccccggaaaaagacgatcccgaaaatagatgggtgattttccgcgtattaacgctgttagatgccctcgtcttctttgatggtggcaaccaacaactgttaaaacagtggacggctgattatccaattgcgtttgcccaagccgaaattctctatcatgtgttggtacgcaaaacaattgattcaccattcacgttacggcgggctgtgattaacttgtgggttgcgtttgatcgcgtgttatcaaccctaggatttgctgaaacgaacctccaacaactcttgacattgacgccggtattaagtgaacggcaactacgattagaagtgcgccaagtctacgatattttacattccgaaaatttatttgcgaccgcaacgaaccaaaaagcgtatgttggaattggtaagagtgatcaacaaaatgcttttgtcttagggattccagaagacaaggcaacaccggaatatttcaaacgattgtatgatttatcagtgcaagccttcttagatgaaattggaatgccgtattcattaagaaaatgagtgcgttcaagctggtcaacttttgagcattagcacagggaagcgaattagcgacgcagtcgatgatttgattcacagtgctaagcacagaaagttagcttgaaaagcacgttaaagaacagagtgcgttaattcgcggttagcttttgagcacttgcctaatcagacggataagcgccaaaggcgattggccgactgatgtagcaaagcgcagaaagctgcgaattaaaagcacgttaaaaaggagtgatggtgatgacttttaaatcaatgttgcatgcggcacagcatgttgttttcttgacgggtgcgggggtgtcaacggcttctggcattccagattatcgatcgaaaacggggttgtatcgtcagcaagccaatccagaatatttattaagtcacacgaatttaatcaccaatccagccagtttttatgaatttgtcacgcagcagatgtattttcctgaagcaaaccccaatgtcattcaccaagtgatggcgacgattgcgaatcaaaaggggcagattatcacccaaaatgttgatgggttgcacacaaaagcgggcgcgcgggatgtgattgaatttcatggtagtttataccgtgtcagctgccaaaagtgtagccaagcagtgccttatcaggcctatttaaaggatatgcatcatcaagattgtggtgggattttgcggccaaatatcgttttatatgaagaaccgattgatccgacggtgattgaacggtcgattcaggcgattgaagcggcggatttaattgtcgtggtcgggacgtcatttcgtgtttacccatttgcgagtttaattgaatatcgccgtccagatgcccaattagtagcgattaatcaagaggcattacaatttgaaatgccagtcactatgatacaagcggatgcgacaaccgtttttgccgcactagcaactaaggagtgagcccatgttaactgaacactatcaaaaaattgatgcaattgatgcccaattggcggttttatttgaagaacgcatgcaagtcaccaagcaaattgcaacaatcaagcatgaacaaaaaatcggcttgacggacatccaacgcgaaaaagcggtgatggatgcgcgccttgctgcggttaaagatccagcactcgcagattacgtaagggatttataccaaacgttaattttaatttcgaaacaatatcaagtaaaattgatgaaggcgatgaaagaagcagaagaaaaataatgtggaaagagcgaaacggagacggagcgctcttttttgatggaaacgtgccgattcgaactgccttttccggttaacctaaaaatggcaatcatggctgaagagcgccataatccccatttttttgttaatcctcaaagccaacccgttcgactcagacactctaaacgtgccgagtctgctatatctttccggttagctatgtatcgcaaacaatcgacttcgtcgctcattcacgatgcgctgctaatcctcaagatataaccggcagattcagcactctgatttgaaacgtgccgattcgaactgccttttccggttaacctaaaaatggcaatcatggctgaagggcgccataatccctattttttgttaatcctcaaagccaacccgtttgactcagacactctaaacgtgcttcctgtcgcagtaatttccgcttaatctaaaaatggtattaatcctaaacccctggattaataccatttttgaattaatgctcaattactaaccgcgacagtcagcactcttttgcttaatatgctaaaatgaaactaatttatgagatgtgaggctattgaactgtgactaaacgacgctataatttagcggtaattcgctatcgcgggactttactattattgaatcggattaagcccccatttgctgggctttggaatggcattggtggcaaaacagaacccgatgagacgccaatcagtggtatgcaacgggagttatttgaagaaacgggtttacaaaccaaacaatacacactccaaaatgtggggtggattgattggcacatcgatggtgaaccgattgcaccgattgacatttttttagtcgatattttaccaacggtgcaactaccactttatccggtcggaatgcgcgaaggcgtgcttcaattatttgaaccagaatgggcacaagctgctgataatcaaggaattgtggcagacttacaggccattttaccaactgttttaagtggtcagctcaatcggtatgatacggattttcatgcagatcagatgattttctttgaagcaattcccattactgaaccaagagaaggagaggaagcactatgatgacaaaggaccaaacgatgatggtcttgatggttttaaagaagaagttgcaagggattcgtttttttagagtcgtcgaagaactgttctcgttatacattatttttaaattcttaactgcaacgggccaggtacagcttttaggggtggcgttttctgaggggcgcgccattagcttaatgttgctgctgctagtcatcgactttagcctatcgcggattcggttaaattataaacgcatgggacaacaattaattgtcacattgaaggatttaacggaacaagaagctttgttcattcaacaattccaacggttctagaggtgtggatatgataacaattggattaactacttggtcagaacatcagtcattaatgcccagcaaaaagcagttaacgttaaacgactacgcgcaatttctgccagtggtagaggtcgatagtttttattatggcttacgcgcaccaaccgtcagcgcaaactggttgacgcaagtaccagccagttttcagttcattgttaaagcacaccaagcaatgacccgccaagaagactacgccgattttacgagtactgaaaaagaattgtttgtgcggtatcgccaatcaattgaaccgctaattaaggccggccaattacaggcggtcttatttcagtttccgccattttttcaactgaatcaggaaaatagtcagtatttacgacaaattcgcgcgtggttaccggatgtgccaattgctgtcgaattccggcatcaatcctggtacgatgacgcctttaaacaacagatgtacgcctttttgaaacagttaaatatgacgcacgtcatcacagacgaagcacaaacaccgacgaacagtgtgccgtttgaaccggttgtcaccaatccggcgtttgcgatgttgcgcctgcatggtcgtaatatggccggctggcagaatccgggtgcccaatggcggaagcaacgaacattgtatcgctataatcaagatgaattgcaattttttgcggatgctgtgcggcagattaaaaatcaagcggaacaagttgccgtgatttttaacaataattctggtggggatgctgcggataatgctttgcaattacaacaattacttgggctagaatttcctgatttagccccgaaagcgcctgaacagattgatttattttaatgaaggcttagtgtgagttgtcgtttaaatgactgctcttttgtgctatactttgattacttatatggcattatttaagcaagtcgagaattgttaagattctcgtttttttaattaaggagcgaacctaatggcagagacaaaaccaacattttacgtaacgaccccaatctattatccatctggtaaattaacgattggtaactcatatacaacaatcgccgccgatgtcatcgcgcgttataaacgcttgatgggctttgatgtcttcttcttgacggggacggacgaacacggcttgaaactcgaacaaaaagcagctgaaaagcatttagccccacaagaatatgttgatggcatggctaaagacatcaaggcattatggcaaactcttgaaatttcaaatgacaaatttattcggacaacggatgaataccatgtcaaagcggttcaaaaaatcttcgacaagttattagcgcaaggcgatatctatcttggtaaatacgaaggttggtattctgtttctgatgaagaatacttcactgaatcacaattagcagaagtttataaagacgacgatggcaatgtgatcggtgggaaagccccatctggtcatgaagttcaacgggtcgctgaagaaacttacaagtttaagatgagcaagtatgctgatcgcttattggcttattatgaagaacacccagatttcatcgaaccggcgtcacggcgtaatgaaatgatcaataacttcatcaaacctggtttggaagacttatcggtttctcgaatctcatttgactggggaattcacgtttcaagtaatccgaagcacgtggtttacgtgtggttagatgcgttatcaaactatatcacagcgcttgggtacggttcagacaacgacgaattgtttaataaatactggcctgctgatgtgcatctagttgggaaagaaatcgtacgattccatacgatttattggccaatcttcttgatggctctagacttgccattaccaaaacaaatttttggtcatggttggttgttgatgaaagacggtaaaatgtctaaatcaaaaggcaacgtagtttatcctgaaatgttagtggaacgttatggtctagatgctttacgttactatttaatgcgcgcgattccatttggtaatgatgggacatttacaccggaagactttgtcagccggattaactacgatcttgccaacgatttaggcaacttattgaaccggaccgttgcaatgattaacaagtatgataatggggcagtgccaacgtatcaagctgacgtgacaccatttgatgcagacttacaaaagacagctacagaaacaatcgaacaatataccagcttaatggatcaattgaagttctctgatgccttagataccgtttggcaattaatcagccgggcgaataagtacatcgatgaaacagaaccatgggtcttggcaaaagatgacagccgcaaagcggaactcgatagtgtcttagcccacttggctgagagtttacggattgttgcgctcttattacaacctgtgatgacgcatgcaccacgcgatatgtttgcacaattagggcttgatttcgatcaagttgcgcaacgtgaattggtttatgggacattcccagccaatattcaagtggttgctaaagggaccccaatcttcccacgtttagacttggatgaagaagtcgcatatattaaggatcaaatgggtcaagcgcaaaaagcgggcttagtgaacgaaaaagtgaaggctaagcaacaagcagctgaagccaaagctgaattcgatccaaaagcaacaacattagtcagtgaaaaggacgccatcaagtttgaagatttcgatcaaaccgaaattcgcgttgctgaaattaaggcagttgccaaggttgaaggcgctgataaactattgaaattccgtctagatgctggggatcaaggtgatcgccaaatcgtttccggcattgctgaattctatccagactatgaagcgttagtcggtaagaaagtcttagccgtcacgaacttgaaaccacgtaaattgcgtggcgaattgagccaagggatgttgttatcagcagaacatgacggacaagttgaattagcagttgtgccaaacaacttggtgaacggctcacaaatcggttaatttaaaataacagaaacgtcaaaagggctaaaaggcatttacattctgtaggccttttagcctttttaatggaaaagagtgtgttgccagtggttagcttttgagcatttgtctaacttggcgaattggcgatggaatcgccggtttgaaagtgtaacaaagcgcagaaagctactggcaagagcacgttttaactgtcagaatgaggacactaaaaggagattgaaatgcaaatttttgattcacatacgcatttgaatgataccccatatgcagggcaagaagctgattttatcgcgcaagccgctgaactcggtgttgttgaaatggcgattgttggttcagatacggtattaaatgagggcgctttgcgcttagcggcgcaatatgaacctttatcagccattatcggctggcaccctgaatcagccaaagattatcacaaggcagaagaaaccgtgctgattgaccaattacaacgaccagaagtagtggcgctaggtgaaattggtttggattatcattgggatacttcgccacgtgatgtgcaacaaagcgtttttgcacggcaaatcgagattgctaaatccttgcatatgccaatttcagtgcacacgcgggatgcgttagaagatacgtacaagattctaaaagaaacagatgtccgtgattgtggggggattatccacagttttaatggcgatgttgaatggatgaaacggtttatggatcttggcatgcagatttcgttcagcggtgtggtcagttttaaaaatgcgcatgaagtccatgaagcagctaaagcatgtccattggacgtgatgttggttgaaacggacgcaccttatttaacgccgacgccttatcgtggtaagcagaatcaaccaggctacacacggtatgtggtagaagcgattgctaaactcagagatgtggcaccagaagaaattgcggcagcgacgtatgcgaatgcccaccggatttttaagttaggagcactatgaaaaaaacaattcaagaagtgattgttgttgaagggcgcgacgatacgaagcggttacgggaagttttcccagatgtttcgacaatcgaaacgcgcggttcagcaatcaatgaagaaattatcgaaaaaattgcgctcgctcaagaaaaacgcggggtcattgtctttaccgatcccgattttcatggcgagaagattcgtaaaatcatctctcaaaatgtaccgggcgtcgaacacgcctttttaccacggacagaagcacgtccggaaaaagcaggcggcagtttaggcattgaacacgcaaaaccagcggcgattgtccaagcacttgagcatctattaacacaagatgaagaagcagacgaacaaatcagtcaatcggatttattaacggcgggcttgattgcgggggctgattcaaagcgacggcgcgaattactcggcgaaattttgcacattggttacaccaacagcaaacaactttacaagcgtctcaagatgttccaagtgacgcaagctgaatttggcgctgcactattacaaattaaacaggaattaggagattaatatggaagatattgcaaatcccgagcgtacccggaaaattctcaaacgttacggctttaagtttaaaaagagcttaggccaaaacttcttaaccaacatcgccattttgaaacaaattgttgaagctggtgatatcaccaaagatgacgatgtgattgaaatcggccccgggatcggttctttaacggaacaaattgccagaaaagcgcatcaagtattaagttttgaaattgatgaacggttaatgccggtcttaaaagatactttgaatcactaccataacgtcacgattttaaaccaagatattcttgaagcggatttaaaaacgattatcgccgaacaatttgatggtaagcataatctcaaaatcgttgcgaacttaccctactacatcacaacgccgattatgttgcacttactagaagcaggcttaccaattgatcgcatggtcttaatgatgcaaaaggaagtggcagaacggatcaacgctgaaccaggttcaaaggcttacggctcattaagtatcgccgttcaacttcattcagaagtgaacttagcctttattgtgcacaagacagcctttatgccacaaccgaatgttgattcagcgattgttgaattagtggggcgcaaagcaccacttgtaacggttgataatcaaaccttatttgatcaattggttcgtggcgcatttgcacaacgccgaaagacattatggaataacttgcaaaatcaatttggtaaacaagatgaagtcaaagcagctttaacaacagccttagaagcagtcgagattgcaccgagcgctcgtgctgaacaattgagtatccaacaatttgcccaattaagcgatgcgctgaataatcagccaatttttgctaaaaaagctaagtaagtaattgccaaatcgttggtacaatggtataattgcaaatttttcgtttatatggtatactatccctcgaagaggtgaagcataatgccaaccacacttgccaatattaagaacggtctcgatgggcatatcggagacaagttaatggttgtcgctcaagctgggcgcaaaaaagttacaaagcgaaagggaattcttaaagaaacctttccagcagtatttgtagtcgatttagatcaggatgaaaatgcttttgaacgtgtttcatacagctatgctgatttgttaacgaaatcgattgagattgagtttgatgaagaaccaattgtcctatagtttaaaatagaagaatagagtagcactcaaccaactggttgagtgctttttttgttcaaaaagcagattgacgaatcgccatatacttcacgtggttgattagatgttgacattcgtttgataaaacaatatcatatagaatgtttatgacgtatacaaaagggaggaagaatatgtttggcaattggagagagaataaagtgaagttaggtgggttcattattatgatctgcttaattccgattttactattactaatcacatttaattttattaagtacgaacagaccactaatattaaacatatgaaagtcgcggttgtgaatcaagatcaatccgcaacatttaaagggaaaaaggtggcagttgggcaacaggtactaaaaacgttgcgcaatgatcaccgggtcgattggcaatttgtcagtgctaaggatgcaaaagcgaacttagctagcggtcgatacgcgatgcaggttgtcttaccgaaagacttttctaaaaatgcgacaaccgcgttagataagtcacctaaagtcagcttgttaaaagttgaaacgtctaagaaaaataactacatggccggcatgattacaacccaagtcgtgaaccaaatgaagggcagtgtcgttcaaaaaattcaagaagcttataatcaagccttgcttggtgcaatcggcacgctaggcagtggcgtacaagaagctagcaatggcgttaaaaagttaaacacagcagccggtcaattatcaaatgggagccaacaaatctatgataatttaaatgtgttgcatagtgggacacaacaattggcagatggtagtgcgccattggcaagtggcgtgcaacaattaacaactggatcaggtcagctttcagatggcttacaacaattatctgacaaaaccggatctggtgtccaacaacttgttactggttcaggacaactttcaggtggcttacaacaattagctggcaaaacagccccacttcaaagtggagtccaacaattaacgacgggtgctgggcaactttcaactgggcttggagattatacagctggagcaggtcaaattaatgctggtttaaaccaattagcagccaataaccaaacaattttagctggtgggcaacaaatcaatggcggtgtcgaccaattaactgatggcaccaagcagttgagcgaaaagttgactgcggcagctgatgaaatcgaagcgagtcttgatggtaataaagaacaattaacacaattgaaggctggtttaggcgctttaaatgctggtattcaagagttagatcaaaaagtgaatcattccaataatgataattccgaaattatcaatgcagacttattaaagattgcggataatacaaaaaatacaggggatttgttacaagatagtgggtctaatctaagtcaagttaacgataaggtttacaataccgctaaaacggatagtgtcgcgagcagcttacaagatgctggtgcacaattacagaagttaaacgatctagccgaaaacaatccgacatttaaaacattcttggctgataacccttctatcgcgttgagagtaataatgattggcggtgcagctaaaaaagacttactcaatgctggtagccaattagaatcttcaggaaagaacatgcaagccattcaagccaacttaggcatgatgggcaataatatgagtgataccggcgttcaattacaagcagtatccgatgaattaacgaagaccgctgataatatggcgcaattaaaagcaggcattgccaagatggcaagcgaagatcaagcgccattagcgctaaatggtgccacacgggccattgataccttaacatcgggattagctaaagttgatactggattaaaacaaaaaggaaatacgccggatacaatgggcgggattcaagccgctgacatgattcatgatggattagttcaaatccaggaaggattaaaaggtaaggtaggacaacctggattgatgccgggattgacaacttatctgaatggcgtttcaaccgcagctacggggagcaatcaattagttgctaataacaatcaacttaacaatggtggtcaacaattaaaagctggtctacaaacattaaatgggcaaacaccagctttggcaagtggtgtgcaacaactcaatgatggtggacaacaattgaataatggattgcaaacactacaaagtcaacttggcagtggcgtccaacagctcaacaatggtagccatcaattagcaaatggtctacaagaattaaaccaaaaagcaccaacgcttgtttctggcattacacaaattaacgagggttcaggcttattggcagatggtgctggacaattaacgactggcttaggccaagcgggtgctgggattagcttattaaacgtcaagttaatcgatggtagcaagcaagttgccaatctttcaacaggttccgcaaatgtagaacatttcgtgcaaccagtcaaagatcaattactatcagatacaaatcatggcgcattaattaataccttctcgccattagtcttaacacttgtcttctttgttggagcaatgttgacgcaattaacactttatcgctatggtgaaacattggcacatagcggtcttaagcaacggatgttggttgtagctggcgtagttgtcgcacaagccttattaattgatatctttgcaaacctttttggattgacgattgcacaaccgttcgcgttcttcgtcttaagcatgatgacgagtgcggtctttacccttgcatgtttagcattggataaactctttggaacgatgggaattttaatggccttcgggttattgttcttacaactcatcattacagggggactcttcccgaatgacatgctttcaggcttctatcgtggtgtggcaatcttcttgccagggacttacacgattagtgggttcgaacaagttgtcaacggcaatggttcacaactttggttagtcttaatcgtcttggtgatcttttgtgcagtgttcttcgccggtttgttcggcggagagttaaaacaaaagttaacgcaaacaccaaatagtcaagcttaaagatttgtggtacagttaagaaataaataaaaaggtgggaaatattgtgaaagatagtcaattgttggatgaatacgttgaactttacatgtcggcgattaaatatgtcgaagacttggtttctgaaccaacgcaagcttaccaattgtcttttgaacaatatctgattatgaaagagattgctgatgataattcagtgagtctaattgatattgctaaaaaacgaagcgtaacacgcggtgcaatttctcgacagattcgtgttttacttaaattagactatattacacaagaaattgatcccgatgatcggcgccggttgattttaaatttaacgccgtctggtcaaaaaacagttgaagaattaaatccgaagatccataatcggtttgcctcgtggatggagacgtttggtaaggaaaatgccaagcagatgcttgatttaatgaatgaatttagacataagattatggtaaaagataatcaataatatcgactgaagagcactgacagatgattgtcagtgcttttttggatgcattgttaaaaggttggtttttacaagcagatatgagtataatgaaacaattaaatgctaggtaaaaggtgaatgtgatgcaacgaattgaaaaagcacctgctaaaatcaatctcagtttagatgcactctttctacatgacgatggggaacctgagtggcagatggtgatgacgtcgattgatttggcagactatgttcagataacattacgcgatgatcccgcaattgaggtccgcacatcaagtggctttttgccagaagatcagcgtaacctggcctacaaagcagctcaattattacaacacacctatcagattccaaccggtgctttaattgaaattgataagcatattccagttgcggctggcttaggcggcggaagttctgatgcagccgctgttttacgggggttaaacgaactatggcaacttggtttaacgcgcgaacaattggcgcgattagggctacaaattgattcagatgtgccatattgcgtatatggagaaaccgcccttgtcactggcaaaggcgatcagatcaaaccactcggatcattaccgaatttttgggtcgttgtcgtgaaaccggaagtcagtgtttcgacgccgcggattattcgtgcattggattgcgaccagattcaacagcatccacaaactgaggcgctggttgcagccgttgaagctggagatttaaatgcaatgactcgcaatatggggaatgtcttagcaccgattacgactgaacgttatccagttatcaagcaattaagtgagcggttattgcagtttggtgcggatgttgctcagatgagtggtagtggtccaacggtatttggtatctgtagtcagtattcacgggctcaacggatttataatagtatgtccggattttgcgctgaggtatatctggttaaaccattgaaaccataataaaacgccgacaatcaaatggttgaggcgtttttaattggcgtaggaatcgctttaatgggataaaagcgaacaattaagctctttttttaaaaaagactaggatttaaccgaagatttctatataattgattggtagacagtttttttcggaaataacagtaaagtaatatatagaggggtattcaacatgaaagttagaagaagcgatcgattaatcgatatgacacgctatttattagaaagaccacatacgttgattccattgacattcttttcaaaccgttacgaatcagctaagtcatcaatcagtgaagatttatcaattgtgaagcggaccttttttaatcgtggcacagggatcttagaaacggttccgggcgctgctggtggtgtgcgctacatgccaatgattaaacaagatgaagcagaagcttttatcgctgagatggcacaacggctttcagaaaatgatcgcttattacctggtggttacgtctatttatcagacttacttggacgtccagaagtattacggcaagttgggcgtttaatcgccaaccaatatgtgggtaaagaagtgacggctgttatgaccgttgcaacaaagggaattccaatcgcacagagcgttgcgatgtacttaaatgtgccatttgtaattgtgcgccgtgattcaaaaattactgaaggttcaacggtcagtgtgaactatgtttctggttcatcagctcgcatcgaaaagatggaactttcaaagcgcagcttacctgaaaattccaaagtcttaattgtcgatgatttcatgaaaggcggcggcaccgtcaatgggatgaagagcttgattgaagagtttgattctgaaatggttggcatttctgtctttgctgaatcagatttcgaaggcaatcggatggttgatgattacacatcaatcttgaaggttgataaagttgatattgaaaataaaacgttaagtgtcagttatggtaattacttaacaaagaatgcagatcgcttagcttaaacgatttgatagcacccggacaggttaattgtgcgggtgctttttttatttgaagtgctttcggacagtttccaagctttgtccgttgcataaatgacagcggtaacatagactgaagttatatttaagaggaggttactatgaaaaaaataatgaatgatccaagccaaattgtaacggagatggtccaaggtttagtgcggagttatccagaccaactcaaacaaattccaggaacagaagcagtgatgaaaatcgccgatttaaaacatcggccacaagtcgggattgtcagtgggggcggtagtggtcatgaaccaacgcacgctggttttgtcggcgatggcatgttgacggccgctgtgtgcggacaagtctttacatcaccaacacctgatcaaatttatgaagcaattaaagcagctgacgcgggccgtggtgtgttcttagtcattaagaattattcaggcgatgtgatgaattttgaaatggcgaaggatatggcggctatggatgatattgacgttcgctcaatcgttgttgatgacgacattgctgttgaaaatagtacgtatacgcaaggacgccgtggtgttgcggggacaatcttcgtccacaagattctgggtgcttatgcccgtcaaggtgctggtatcgaagcaattgaagaattagcgcaccaaattacaccgaatattaagacaatcggggtcgccttatctggcgcaaccgttcctgaggtcggaaaaccggggtttgaattagcgcctgatgagattgaatatggtgtagggattcacggtgaaccaggttatcgccgtgaaaaattacaagattcgaaacacctagcaactgaattagtcggcaagttaaaagaagcccaccacatgacggccggcgaacattttgcggtaatggtaaatggcttaggtgcaacaccactgatggaacaatacgtctttatgaatgatgtcttggacctcttggccgctgaaaatgttgaagtcgacttcacaaaagtcggcaattatatgacctctttagatatggccggtgtgtcattaacaattatgaaattaattgaacctggttgggttgctaaattagatgaaccagtcacaacgattggttggtaaaggagagataccatgttaacagttgaaaatacattgaaatggcttgaattgtttgatgcaaaaattcaagctgaaaaagattatctaagtgaacttgatacaccgattggtgatggtgatcacggtaataacatgtcgcggggcttgttagctgtgcatgacgcattgaccaagcaacagccaaccgatgtacaaggtattttgaaaacgactgcgatgatgctcatcagcaaagttggtggggcttctggtccactctatgggacagcctttttagaaatggcaaaactaagcagtacgacacttgaagtcggcccattattggcagccggtttagaaggaattcaaaaacgcgggcatgcacaagttggtgaaaagacgttgatcgacgtttgggctcccgttgtcaaagcggttgaagatggtactttagatgtggctgcaattgaagctgccgtcgaatcaaccaaagatatgcaagcaaccaaaggtcgggcatcttatgtcggtgaacgctcaatcggacatgttgatccaggggcggcttctagtggatacttatttactacaatgttaatggcgggggtattatcatgagtgaatatggtgttgtgattgtttctcacgtaccagaaattgcggccggtgtggcgcgtttaattaaagaagttgccgctgatgtttcagtaacgactgctggtggcacggacgaaggtggtattgggactagcgcaatgaagattcaaagcgcttttgaagccaatgcagggcaagaattgttagccttctacgacttagggagcgctaagatgaacctcgaattggcccaagaactaacggataaaacggtgcatctatacgatgttgctttaatcgaaggttgctatacggcagcggcattgttgcaagcagggacggatttagctgcaattgaagcccaattagcaccgttgaagattaaataagaagtaaaaactgcttaaaatgatgtctgttttggagactgagtttaagcagttttttatatagaataatattcaaaagaaaagatgatttttaataatgtaactagtaataactttaaaatattgttgaggacggtaatgtgattttaaaatacggtaagctatgtattaaatagatattgctgttatatttaaataaattaagaatgaatctactaaactaataaccatatctaatcatcgataatgccgtcatttcttttaacttagcttgttgactggctgatagatccaagccttctttttgaatcacattcgcaattgcgatgttcattcggctcaaaattaatggtactgctgtcgtttgtgcttcaatttcagtttgataactatgcaaaactgattgtaatggtgccgcttggtcatcttgtttcaagtcgtttaataatgccttaatcattgtaattgcttgatgcccacgttcctgtccatctgcataccatttcatattcaatcgtcccttactcttaatcaactgttgagacaatcataacgcttatctacatcattgacaaataactaaaaaggaactataactagtgtgaattattgttatttggaggggtttaaatgataagtcaatcaattgcaaaagaaaacatccatacactttacaacagtctaatggcgcatccggataaatcaaatgcattgttagatattaccgatgttttactacaggtctacctcaaaattgatacggttaagaatcccgaggcactcgtcaatcgcctggccaattacatctatagtgttggctttggcaagattcatctcaccaaggatgaagaacacctattgattgatttaggcgcgtttggccaacgtgctggttggaacggcgtttatcgcggtgattatactgccaaagccgattttttcagctatgccgatgaacataaatatgctagaaattaaaagagtgtgacggaagtctgggatttcccgagcacgcttagacgattagatttgaccatcagaaaagggattgagacaaacacaacgtttgtctcaatcccttttttaggcaagaatattgccaatcccatggttaataatcgtaaattcagtcggttgtaaatcagtttgttcagtgacgattggattcaactggtcaatcgtaaacggcgaagtaaacggaaagccgtcaccgtactgattaaaataagtcacagtattccccagcacgcttttcaattgctcagaatcgattgcccgcgtcactgtcaccaaatacgcacgattgttatcgcccgtcaaagtggtgctcgtaaaaaatttaaaatagtctttcgtactcatcactgatccccccaatctttaatcaacgttattataacgctttcaaagaagcaattacagtatctttcgtcaattccattataatccaccatcattgcaattcatcaccgttacgccagttaacttagatacccataccacatcacttagtgattatcatcaactcaatccgaagaattacatcccagccttgcaaactgaatcgggcgatttcatgactgaatgcgccgttattttggaatacattagtcaccaaagttcgctgccattaatggcgaactatgccactgaacagtactggcaacaacgcatgtggttgaattacatcgccaccgaattgcataagaacttcatctcaccatttcgtaaaggcaattggctccccaatacacccgaaagccaagatttagtccgttcacgggttttcccacggctcgcttatattgaaaaagcgttagcgggccagtccttcttagttgctaatcaattcagtgctcctgatgcttatctattcgtcatgaccaattggtgtcgacgactcgcattttcattgactgacttccctaatctggaccgttttgatcaacacatgcgacaagacccagccatgcaatccgtcctcaaacaagaaggcaaaccacattcatcgaaagcttaaccaccaaaaaaggaatcagcagtcgctgattcctttttttaatgatttacatcacattaatcgtgacgtcaatattgccacgagttgcctttgagtatgggcaaatttcgtctgcttttttgagatacttcattgtttcttcttctgataaaccttcgatgtgaccgaaaagatcaacaccaatataataattggcagggccatcactataaagggaaacggtcgccttaatcgtgggttcgcctttaatatgttcttggttaaggacaacatctaaggcactgttaaagcaagaactatagccggctgcaaagagttgctctggatttgtactcttccctgatgggtctgtccctggtgacttgattacatatttctttgcttgatcgggtgaataaacgaagccattgcggcccccttcattaatcatcgttgtttcatattgttttgccatttaaggtccctctttcttttattgaatacccttactttagcacagcaaaattcagaaccataatgatttgtttatacaaaaaaggcgccagccaaaaaatagattttggactggcgcctttcttgttaatcctcaggctataactggctgattattcacacgctatttaatataagccgtcttgtagctccattgtgcgccagctgtgttatgcacaacgcctttgacctttggattcttcaagtatgccgtatcattttgatagagtggtgtaatcccttggactttattcatgacttgcgcagctgtcacgaggtccgcccaacgtttgtcaggatcgttcgcatcggcattcattgcgcggtcaagggctgctttgtattctggattgtcgaagcccccggtattacttgcagcccctggtaacatgatttctaaaaacgaaattgggtctttgaaatctgccccccaacctgcgagtaataaatcatagtcgccttttttatcacgactcgctgaaacttggcttggcacggtctttaatgtcaacttgaagcctggtaagactttttcaagttgacctttgagatattgaccaacatatgatgcgttggcatcatcggaattaagcgttaaggtgagggcaactttcttttgaccagtcgctttcagtgcttcatgccaatgtttaagcgctaatttttgattgtaatccacggtatctggcacggcttgtgatttagcaaagtccaccttcttaggggaatcggctaagcccactggcacgaaaccagtaatatcgtttttcttcgaaccgaatagccggttattcaacgtcttacgattaatcgctaacgaaatcgccaatctaaagtcttggttattcaaaagtgcttttttctgttcatctactgatttgaagttgtatttaatgtagttcgtcaacgcataaggatatctgtggaatgctttatcatcccgataattatcaatttgttgattatccaactgggttaaatccagtttcttttcctgataaagataaagcgcggtgctggtattttctaacacggtatagttgacttggtctaattttacctttttgcgatcccaatattgattgttcttcacaaattgccacttctcactcgtcccattccagttaactaacttaaacggaccagagtacaccatgtatttcgcgtttgtcgcatacttcttaccatatttttcaaccactttttgatcctgtggggcaaataatggataagccatcaaggttttcatgtaggccacaggtgtggataatgtgacttccaacgtgtgctcatccactgcccgtatgccgagttggtctggtgccatctcaccttttgcaatcgctggggcattttggatattactgaaaaggtttgtataaggtgatttggtttctggtttcaatgtccgttgccatgaatagacaaaatcttgcgcccgaatcgggtcaccattactgaacttggcatcacgcagtttaaatgtccacgtcttaccatcagctgaaactgaactcgatttcgctaagcctggttcaattttaccgttctcaccaagccggaataaactttcataaatgttccctgtttgaccatatcccgttgaagtcgagatatcaatggtatctagtggtgcttgcgcgccaagctgaagaacctgtttggcttgcacccccgaaacttggcataataagaacaccccgaatataaaaattgcactaacactaagttttaagaactgccgccctctttgcatgacacgcctccttacatttaataagtagagcataccaaatcatcagtcaaaagttaaataataagcctaaaaaagcgccgacaaaattaacttttacaaaggcctacaatattaattagacggaattctcgactgacggcacattctaaacgtgcttttcaaaccatgttcctgcgtttagcctaattagccaaataagcggcttcgccgctttttcgtctaattttgctaatcctcagaacataaacggtttgaacgcactcttattcgaaacgtgctttcaaaagcatactgctgtgcttagctacacaagtcaaatgattgctttcagcaatcattcgccttgttaggctaatgctcgcagtatacccgcttttgacgcactctttagttcattatttcaaacaattgttttctgaattctggaccatacatgactgctccgactgggatggcgaagtctagtgcttcgttaattttagtcgtccaggttggtccgaagcccccacagagttcaataaattgaatgcctcctgccttcaattgcttagcgacttcaataattgaaccatcttctttagcacgtggatcgaacccgacggtaatcatctcgcacgttcccattggattacggttaatcaccgtattttattcaggtgaaaagtctggtgaaaaatagaaaaacgcccatttatgcaaatttgctaatgccattgtttcgtcctccttgtttgctttcatcatagagaacaatcatgatagaggcaattttactgcctcttacagccagccattatgccgtgcaatctgaattgcttcaacgcggttgcttgcatccaatttgcttaaaatcgtcgacatgtaattgcgaaccgttccatccgataaaaataatgattcggcggcttgtttcgtactcaacccattagcaatcgcacgcaatacttccgtttcccgctcagacagtggattcttcgtttgcgttgtcagcccaacaactaattctggcgcataaacaactttgcccttcatgaccgaatgaatcgccacaatcaagtcatcactcgggccatcttttaatagataccctgccacttcggtgctgatagcctgcttgaaataactcggttgggcaaaagtcgtcagaataatcaccttaatctgtggctgacgcgtatgtagttggcgcgcaatctcaagccctgtcatgcccggcatctcaatatctaacaaaacaacatctggttggagggtttcaatctgatcaagtgcgacttgtccattgacggcggttccgaccatcgtcaaatcatcctctaaatccagaatgcccgctaaagcggtattcaatagttgctggtcttctgccaaataaagtttaatcatgcccttccctccatcttaagtggcaccgtcatcgtcaactgtgtgccccggcgaccatcgaccatcaactctccatcaatcgtttctaaccgttcgcgcatgcccacaatcccatgactcttatattgatcttcgcttttcaatccgcgaccattatcttcaatctgcatctgaaaagtcgttgcggttcgattaaaaaccacgtaacactccgttgcctgactgtagcgaattatattggtcacggcttcatgtaaacattgcgcaagcacttgttgattttgttgtggaatcccttcaagttggtcttcatttttagtcagcagtaaaatgcctgcaacgctgagattccgttcttgattgatcaattcctcagcaacggtcacttggcgtaaaccagcaacaatctcacgcaccatttttaaattctgacgggaggcttgttcaatctcgagtagttgttcgggtaccgcgtccggttttttcgccaataatttacgtgcatattccgcttttagcgtaatcattgaaaatgactgacctaaattatcgtgtaaatcccgtgcaattcgttgccgttcgttctgcttaatcatatcggttaatcgctgattggtctgcgttaattggcgatttttccgattgaaacgctgaatcgagctagccgcaaatggtgaaaagatgcagaacaagccgtacaccattaagccaatcagatcatcgcgtcccatatgaccaccataataccaatatagggtgaccgctggtatgattagtgacaacagataagcgtagtaatagcgccagaaacttcggcggcgcatgggaatcgaaccaaacacccaggcagtataaatattcagataaaacgcctggataatgactgctaaaatcgcactggtcaccatttgtaagataatccagaatgtgcgataccgcgatgcgacatacccattgcgataagccaccaagaaaatcagaatcaagcccataatcgcttgctgcttaaccgtttgatacggaaacgcataaccaattggaaagagcaagaaaatcaaccaaacatatggaaataagccatattggggtggcatggcaatgtagcgtttaaaaaaattcatgcatgcatcgctcctcttttatgatggtttaagtatacgacaattgccagtaataacccagcccagagcaccgtgatgccatattcacccaagtgtgcgggttgatgcgcaatcagcgcttggccaatatgattaattggataaaccggcaaatgcttgccaatcacgcgagctgttttgggcattatttctgttggccaccataatccccctaaaattgctaaggggaaagctaacaaattagacaccagttgaatctgattttcatcttttaaaaatgaaatgctaatcccaattaaacaaaggggaatgctggcaaaccacaaccagcccgccgttaataaccaactggaccacactaaatgaatttgattactaatcccagcaactatgaaaatgacgccgatcgttaaagcattgattaagcctaagttcaacaacttagccccataataagtccgatgactggttggtgataaatcgattaaggaaaccaagccatcccgtgcgtcattataaagtaatgtcgataaagtaaacgtgttgctgagaactaaactataggtcgccatactgaccatgtattgtcgattgaatgctgcattcatcacaccctgtttcattactttcgtaaacaagagataaaacgcaatcggcattaagaatgaaagaataacaaagcgtggattacgccaatatgcgcgtttaaagtctatttttgtttgtaccatcattgtttgcattttttagtcctccatcatttcgctataaatttcatttaatgagcttgcttgaacctgcacatcatgaacctggatccccatcattggtgctaattgacttaagatcggatcgctcttggtaacttgcaacagcaccttggccccagtcttcgtcacgcggatcacgcctggccattttgcaaaagtagctgctggtaaatcagtcgtaaagcgaatctgcgttcctttaaattgttgttgtaatgttgccaagtcaccatcgaattggaactggccatctttcaataataaaatccgggttgcaatgtgttcaatttcctctaaataatgcgacgtgacaataatcgtcttgccggcttcttttaactgttcaatttgctgccagaatttttgtcggctgccaacatccattccaacggtcggttcatccaaaaatagcaaatccggattgcctgccatggctaaagcaaaggagaggcggcgtaattgaccacctgaaagttgggacaccatcttatgagcctgtgccttcaaatcagctagcgttaataattcagcgactgaccgtggctgttgataataactgcaaaccaattctaattcttcgatgacactgacccgagccagtcggacatttccttgcatcatcgcacccaataagttgaaatgttctttctccgttggcttctgacctaaaatccgaatctcgccagccgttggttggagtcggcctaaaattaaattaatcaatgttgacttgccggcgccgtttgcacccactaagccaacaatctcaccaggttgaacacttaagtctacctgatttaaaacaacttgttgttcgaattgcattgtcacttgtttaatttcaatcattgtcatcacctcatttaataaccctagtatagaagtgattccgttttgtcgttagacgattttgtcatgacttacagatgacaaatgtcatgtctttggtgttaaaataaagctgattcgttttaactcggaggttttaattatgacaccaagccaaccagcagcaccatcattttttacgaaccggtctacccaagccatcgcgcaagatttattaggaactcacttgctttataccagccaccaaggcacacttggcggcctcattgtggaagcagaagcctatgtcggcaccgatgacactgccgcgcatgcttacaatgggcgccgcacatcctttagcgagccgctctatcatgagcctggtacaatttatatctatcaattacgcggtttctttctatttgatatcgtgacccaagcagtggatcaaccacaaggcgtcttgattcgcgccatcgaaccgacccacggcattgaacaaatgcgcctcaatcgcccgaaacctggcgtcgaactgactaacggccccggtaaattaatgggcgccctcggcattcacgataaacaactgacttttcaaaatgtggcggacgcccctttaatgattgatttagcgcatcgtcgccaccccaaatcaattgtcaccgcgccacgaatcggggtcaattataaagcagcgagtggtcaacttccttatcgctattatgtcgctggtaacccgtatgtgagtggtctgcctaagcgccagtgggacttagaacaacacggttggcaattttagcgccaatgtcaatttttaattgaaaacgatttcaacaatgctataataatcttgtgaattaaataattaagttagaagatcattgcatgaaaattaaagcagctgttgttgaacaacaaggcgcaccatttgtcattaaagataacatcgaactcgcaccactccacccagacgacgttcaagtccacatggtggctagtgggatttgtcactcagacgaagcgcttcgtaaaggcgacgccattattggctatccaatcgtcctcggccacgaaggttccggaattattgaaaaagtcggttcaaacgttcaaagtttaaaagttggcgaccatgtcgttctctcattctacgcatgtggcatctgtgaaaactgtctcaaaggcgttccaacacaatgcctcaactacgcagaaaataacttatccggcgtgcgccctgatggtagttcccactttactgaaaatgaccatcacattgccgatatgttcgatcaatcttcattcacaaccacaaccgttgtccgcgaacgaaatgcggttaaagtccctgacgatttagacttacgcaaactcggaccactcggttgtggatacgtgaccggtagtggcactgttttaaatactttaaaaccaaaacctggcgacacaatcgccgtcttcgggactggtgctgttggactcgcagccatgatggccggtaaaatttcgggctgtacgaaagtgatcgctgtcgatatcatcgacgaccggctcgcactcgctaaagaactcggtgcaaccgatacgattaacagtcgtcaaacagacgacgttgtcgcagcaatccaagccctcacaaatgggcgcggcgtgaacttctgtgtcgataccacggggattacaccagtcatggaagattcaattaaggcgctttgccaaggtggggtgtcagcaacaattgccgtaaccccaaaccacatcgatcttgatacttggaacgacttatgtgtcaacgacaaatccgtcgtcggcgtcaacatgggtgactccattccgcaaatcgacgtccctcgtttaatcgaattctaccgtcaaggcatgttcccctttgataaaaccgaaaaattttatcaattcgaagacatcaacactgccaacgaagcctctattaaaggtgaaacaatcaaacccgttttgattattgacccggactatcaattctaagcaatcaaaaagaccgcttattcagcggtcttttttaatttttctgacgccaataatggccaagtgttatcaacatcatcaagacgattattcctctgagtaaccaaagacccaatagcgcgccaaacacaatggtaactgcagacactaatggcttttggaaaataaacgcaaaccctaatataataatcaatactggcatgcagtccagctccttttctttttgaaaattgcatgttaaatttaaagcaatcatatgaagtgaggtgttagtagtgccagctattcccgataatctacttgccgcgaccatggggcgtaaactcgctacggttcgtcgtgcgcaaggcttgtcccaacatcaattagcccaggatatttgttcgcaaccgatgattagtcatattgaaaacggcacttatattccaaacgccattttgttagcaaaactctgcgaacggcttaatatgccgttagaacaagcgctgttaagtcattatcccgaaattgatcaacaacccgaattcaatcaacaaattaaacaactgtgcaatgcacacgattatcgcggtatgttagattatttggatacgactggcttggccgaacaccttgaactggcgaccgatttacagacctactactactatcatggcatcgcagtattccaagaacttcatacaaccacggatagtttacgggaactacaaatggcactcgactatacgtttacaccgcgccaacaagttttaacgcctactgagattttgattctcagtagtatcagctttattaagagtacgccccatactaatcaaactgacttcgaacacgtcctcgcaattgtgaatgcagggcggttcacgcactatgacgagaacattaatatcttattctacctgtatagtctggcactctatcaagatcaccactttcaaaaagcttttgccatcgccaatcaaggaattgactggctcagcaatcatgattcacactacatgttagccgacttattcttgctagtcgcctgtacaataaaaaaagagccacgacaaaaaattgacttttgtcgtagctcttttttgaaattctatatggctcattctactgcgctaataattgtccaattcttgatttaaattcagttaagaaacgcggcgtatcaacttgtacacaaaccgccgtccgcgttgctggatcatctaggcgggcattatccccaattgttcgtccacgtgacgggccttctatctcagtcttcaagttcaatgggaaagtcgtgactaagctaggatcgattgcaacagcgactgctaagggatcatgtaaggcacagccgtgcaaatggggagaagtgacttcataggctttgatatagtaatcaaccatatcggcataagctttggctgctggtgtaccgagtgcgcgccattctgccgtatcggtgcgtgtaaaaagtgtgcgcaacgtgacatcaaggcccaccatcgttaccggcaaaccactcttaaagagtaagtccgccgcttcagggtcttgactgatattagcttcagcaaatggagacacattaccacaaactgttaaggcgccacccataatcacgatttgaccaactttcttcaaagttggtaaatctttttgaatcgctaacgctaaattcgtcatcgggccagttgccacgatgctcaagtcagccccatacgcctgacaagcacgtaatataaaatcaacggctgattcagttgccatttccggatggggctctgtcagatgaatctcaccaacgccgtcttgaccatgaatttccgcactaattggtaagacgctaaaatcatgcgtcgtcgtcgaatgcccagcccctaaataaactggaatgtctggatgacctaataaatgtaaaatttgttgactattcacaacgcttcgttcagtcaaaacgttgccgtattctgaggtaatcccgattaaatcgacttctgatgatcccaatgcataagcaattgctaacgcatcatcaatcccagtatctaaatccaaaatcattttttgtgccacgccaagccctcctcaataatcatgcaaaataatgtacaccacaagtgtaccccattatcggggacgggtaaattaataacctaaggattaaactcaaaaaagacaagtagattattctactcgcccttttcgatgattcagtttagaccattgatttcatgatgcattaaaatcgtttgaccatctgactgagtcttattttggagccgatctaataacaacttagcagctgccaatccaatcgcttctgttggcggttgaatcgataggattggcaactgtccaaattgatgttcatcggcataatcatagtgaccaaatagtaaatcttggccaatccgaataccattttctgataaataagtgagcgcaccaaaggccatactatcattgctgacaaataaagctgtaataccttcggctaataatgcttgggcaccgcggtacccgctagtccgagaatagtcaccttcaaaaacatgtaactgtctgtctggataagctgccatcgtctgtttagcacctgccagtcgttcacgggcaacataatcatcctgattagcggcaatcatcccaatattctggtgtccgagatcaataatttgttgcatcacttgtgccacacttgcgcgatcatctaataaaatcgaatcaacattgcgtagctgatttgggttattaatcgtcacaaccggaatatcaagtgccgctagtcgttccattccttgccattcttcacctgctaagaaaacaattaaaccatcaatcgaatgcgccattaaataatcaattttttgatcaattaacgctggtttgtcactaaaaccactcaataataaactatacccttgttgctcaacgcgttgttctattccagaaacaacttccgcgccaaatcgacttgaaatactattcatcaataaaccaattgaaaaactttgattgttcttcaatcctttagcgataatattttgtttgtaatcgagttgctcaatggccgctgcaatcttggcttgattaactgctttaagctgttgcccattcagataccgtgaaacagttccgaccgagactccggccaattcagcgacttctctaacagatgacactcttattccccgcttatatcgataaagtgattttctccgctaaatcagcaaccataatagtcgctgcttgcgcacgtttcacctgattatcaatatccatgtaattaaaatcagcagcaggtagttcgaaagtaatgctcttttcttcacctggttggaaggcattcttttggaaagcttttaacagcttcgttcgttgaataaccgctccaccagttaatttgacaaataataaactactttcttgacctacaaactgtccgttattttttactttaacagttacaactagtttgtcaaccatttgcttaaccgctaattgtcgataatcaaattggtcgtaactaagtccgtaaccaaatggatataacggttggccaacctcatcatagtaatcatcttgtttagcagcatcgcgttgatagtagtaaaccggtagttgctgggtattgcgcgggtaagacacactcaacttaccacttggattattaagtcccactaaagtttcagcaattgcgcgaccaccttgttgaccaggaaaccaagcaatcaatacagcatctgcaagttcatttaccagtgttaaatcgtatggccggccttgcaccatgacacatgcaattggcttgcctagtgctttcaattgcttgagcagcacttcttgttggcccccagactaagtgatgcgacatcaacattttcaccagaatccatgttgatgccttttgaactcactgccccgttacttaggaaggccatatcaaaattacgtgcactggaaccacctaatacagggatgattaaatcggcatcgcgcgcaagctcaactactttggcaattgcctcttcttgatgaattgaattacgcacctcacagcctaatgcatacacgacttccgactcgggaaacatttcttgaatcgcttgataaattgtttgcgcttgacgcgctgaactttgtgctgctgtataatcccccaagagattatataattcatcagcattggggccaatcaccgcaatcttttgcggctgattccggattggtaaaagcccattgttcttaacaagcgtcatgctttcacgtgccacttgcagattcagcgcatcagatttttcaagcaaggccgtcaattgcgcattcggggcttgtacatagggttgttcaaacagacccaacaggaatttcaacgctagtactcggccagcagcattatctaaggcagcttcgtctactaggccattttcaatggcttgatcaagcgttaggaatgtctgatcccataaacttagatcgacacctgcatttaaggctgccgccgcagcttctggttgtgtttcaaagattcctgataaccgatcaagcgcaacaccatctgccatcacaatcccttgaaacccatttacatcccgtaaatcttgagtcaacaacggctgattgatatgacacggtaccccatccacatcgttataagcagccatcacacctgccgcattcttgacactactcaaaaggggttcatagacgtctgaaaattcacgttggccaattgtgacggtgcctgaattatggccacccaatgcttcaccttgcgcaatacagtgtttcaatacaacaccaatggcatcagtcgttcgcggtttagcaggttggtctaagaaagcaacatcactttgaattaaatccccttgaaaacccgccacaacggcttcactcattcgcgccgctaaaatgggatcttcaccaaaacattcttctgaacggccccaacgtggatctttgaccaaatcaagcgtcgaaacaagcgctaggtaacgcctttaagcgctagttcttgtgccatcagatgcgatgattgctgcattaaccgcgtattaaacatattgccgcggccaatattcgttggatacgagattccttcaagcccttgatggccatgaggacattcttcaacaattaatgctggaatcccccagcgtgaatgcgccatgacatattcttgaactttattagcaactcgccaactatcctgtgcacgaacgccattttcaaagttcacttttgaccatggatctgcgcgaaataaaccataaagtgcaccgacaccgccgccccattcaacatgcgccttgaatttttctgtaaacgttaatgactgagaatcttcgaaagtttcccatccataaagatgttgattcacttgaccaattttttcctgcgtactcatgcgtgaaagtaaataagtgacccgctcacgaatggtcagcgctgcgtcttgatatggatactgcatttcaaaaacctcattcctcagttaatactttgttacttgcaatgacaaatggtaagaataaaaagacatctaaaccaattaataagatggttaaaatcactgctcggtaatcaccgccagttgccaagaaagattgaataacaggcggtgtaatccatggtgcagccgctaccgttttactaatcaaacctaagcttgttgcaaaataagcaatcactaaattgattgatggaatgatggcacatggaatcatgaaaattgggttcataacaactggtaacccgaacataacaggttctgtaatattgaagaaacaagttgttaaccctaatttagcaacttgccgttgatctttccgccgtgaagcccataaaatagcaatcactaacggtaaaatacagccgcccccaccaatcaagccgaacgcatttgtaaaaggttctgtaataatatttggaatcgcatgtcctgctgaaaaagccgccatattttcttgaatggcttgtagcaatggtgcttggcgaactggcgctaaaatgctagacccatgcatcccaaagacccataagaaatctgagaagaattgtaagaataacgttcccggtacagataatacaaacgattttagtggcgtttgaatcgcaaggtcgattaattgagggacattcaacccggttgtcacatttaaaataaatacaaaaatagtaaaaatcaaaacaaccaagacttctgggactaatgaattaaacgaggttgcaactgctggtggcacgccttctggcatcttgattcttattttttcaaactttgtaaaacgaatgaataactccgtactaatcaatgccgctaacatcgctgttgcaagtcctgatgacgaggttaaactttgcaagaaaacgcctgttgcttccgccgttttcccatttgctaaagtgacggtactcgtcacaggcatcaaaataaacattgttgccaaacttaaaataccagcatgaactgcactaaatgcaggatcgttcactttcccagagcgaacataatgcgttgctaaattagcaccgatgttataacagaccacaattgataaaatactcatcgtcccattattcacaattgttgctagatcagctaatccgcttaaatcaacaatcttttgaacagcggcgtttgagaaaattagcgcatttaataaaaccataagcgaggccgccataacaagtggcattgtcacaatgaagctatcccgaattgcaattaaatgccgctaattattgagtttagaaacaaacggcaacatcttttctgacagtttatctacgaatttcacagtcatttctccctttattgaatagaattgaaccggttcaatttcatataatagcacgcgattatcattttgacaatagcgcttacaaatataacctaaaaaagattgagtcctcctcatgaacaactcaatctttaaaccattgacaaaggccacctattcctaggtggccttctaattaatttcgcatattaaattcttacataatgtcaggtagccagtcactaattggctacgcacactagcatcgaatggctagtggagatgacgtgtgattcacgtcgcttttatttttgggttaattcaattatgtctaaattcttgtgtttctaaatatcttctcgtttaaacagcgtaagccgcctctttacactacttgtaactccatggttactccagttgattaaagtcttcaaataatacttgatactacagtgataagtgctgattaactttcctaagtataccatattttcagttcgaacacaaaatgaccataatctttctgaaaagaggctttctatttgaccaaaattgacctttgctgtaaaattcaatttatagactacagagtgattctactctggcttatataaggaggcaattcaatgttagtaccgacagttatcgaacaaacatctcgtggcgaacgtgcttacgatatttactctcgtttactaaaagaccggattatcatgttatctggtgaagtgaacgaccaaatggctaacacaatcattgcgcaattattattcttggacgcgcaagattcagataaggacatctcaatctacattaactcacctggtggttctgtgaccgcagggttagccatcatggatacgatgaacttcatcaagtctgatgtccaaacaatcgcaatggggatggctgcttctatggccagtgttttactttcagctgggacaaagggcaaacgttttgcattgcctaactcaactgtcttgattcaccaacctttaggtggtgcacaaggccaacaaactgaaattgaaatcgcagcgcgcgaaattttgaagactcggaaacgtttaaaccaaattttggcagacaactcaggccaaaccttcgaaaaattacaagctgacactgatcgtgataactacatgacagcgcaagaagcaaaagattacggtttgattgacgatattatggtcaaccaaccaaaatagagtagataataaaccggttctcttctgaggattagtaaaaaaaagggctagatcaagttgatctagccctttttttataccaaatttgttatactggcagtatcttaaaggagggtcttccatggatattagtgtgattaaaagcgagaatgtgacaaccaccggcggtattacaattggtcagccagatgcaccattaacatcaattgaatttatcaacgccgcttgtccttattgccgcaagtggtttttaaaatccgaagaaacgatgactgaagcagtcaaagctggtcggctaaaacgtattatcaaaccttttggtaaggataaagaggatctacaactggggaatttagcccatacctatttaccttttgatcaacccgaaatagtgctgcaaacactatcattcttgtttacgcatcaaaaaacatggcgtaatgatctgacaccagatgaatttaaaaaatacatcgatcaaaatctcaaattaacgccacaagataatgcagaaaatttagccgcaattattgctgaagccgatcgtgccaatattaaattcgtcccgaccatcattattggtgaccatatctttgatgaatcaattgatatgactgacttaagtcaactactaaaataaaaaacaggtgccccccctcggggcacctgtttttgtatgtacgataaagggttccaaaaaattcaatttaccatcaaatcttttggaaccctttatccgtcattttatgaaaaacgtgcattatccatttgaatcgcattcaaatgatgttcaacttcattcatttcttgacgtaattcatgatacttatcgcttgagaaatcgagatagtttgtgcaagcaccaacccgttcgtagatttcttctttttgactttctgctttttcagttaaggtaacgtcaactcggcgttcatcgtctgatgcacgattccggcttacccaaccatcagcttctaagcgtttcaaaagcggtgttagtgtcccactatcaagttctaaatggtgccctaattctttcactgacatcttgccatgttcccacaatgcaagcattgcgatgaattgtggatatgttaatccgtaaggttttaataccttaccgtagaaatgattgtaagccttttgtgcgcggtaaatcgaaaaacagagttgttcatctaataatactggtttaaccatataattttcctccataaaatgtccttcagttattgtacttaattatattgtacaagtcaaatattgtacactaccgatttattttgccccttatccattcccctgttggtgggcttcggcaagttgattcaattttctgagccgatgattaatccccgacttcgaaattgccccactcggcattttttccccaagttccttcaacgtaatatctggaaattccaaacggagtagcgcaatctcacgcaacttcgccggtaaattatctaatccgacggtgtcgcgcaagtattcgatattttcgatttgttttgtagcagcatcaattgtcttattcatatttgcggtttcacaattgactaagcgattaaccgaattacgcatatcccgcacaatccgaatgtcctcaaacttcaacatcgcgttggtagcaccaatcacttgtagaaaatcagcaattttttcagcctctttcagataagtgatgtacccactccgtcggaaagtcgttttggcatttaagccaaaacgattcatcatgcgcgcaatatcttgattatgctcttcgtataatgaatagatctccagatggtaccggcttgtttcaggattattcactgagccaccggctagaaaagcgccccgcaaataagaacggacgcgctgatcttcattaatgacatcttctgacacctttgtatgaatggtaaaaccgtcctcctcaacaatatcaaggtcttttaaaacggtattggtatcatactttaagcgcacgatgtattgattattcttttttaacttcattttgcgacgtactagtaattcggattcaacttgataattttgtttcaataaactataaatccggcgagcaatcgccggattctcagtttgaacgtttaaaacaaattggtgattcatcaagctcagtgacccattcatccgaattaaagcggctaattccgctcgtgcatgttcaggatgcacttcaagttgcgtcagttctttcttcacttcacttgcatatgaggccacgattattcacctcgcttagctgtattgacctggaaagcaagattcataatttcactcgctactttttgtccattatggaacacaccatgatctttcaacttcaaaaagttatcggaaatcactcgacaacccaatcctcgtaagccatcaaagtcatgttcaaccggccagagaatttcgtcgtacttttgatgatccaaatagttttcagggacttgtgcggtattaaccaaaaccgtgtccacgaagttctgaccaagatgatcattcaacacgcggacgtgatcggcatcggtaaagtgttccgtttcccctttttgcgtcatgatattacaaatgtaaatcacttccgccttagtttgcttgactgccgcacctaagtttttaatcattagattcggtaaaatactggtaaacaaactgccgggtcctaagacaaccacatcggcagccaaaatcgcatcaaccacttgttgaacggcttcgggtgctgcagtatcatcttgatccgtttttgagacccaaacacgcttaatctgcttgcgtgctgcagtaatctcagattcccctgttaactgggtgccgtctttaaattcagcattcaacgacagcgcaacattggccgcaggataaatatgaccgtcaaccgccatcatttctgataaccgttgaacagcatcaaaaatacctgattccatttcagataacgccgcaataattaaattaccaatcgcatgccctgagaaaaaggcatcgtgtgatttaaagcggtattgaaaaatatcgagcgttaactgtggtaaatctgacaaggcgactaatacattccgaatatcaccaggtggtaccacgttaatgtaatcgcgaataacgccggatgaaccgccatcatcggcaaccgtgacaattgccgtagcatccgcattctgttcacggagactctttaagataacgggtagtccagtgccgccaccaatcacaacgacttttggtcgtcgccctttaatgacccggataatccgattagtagctgtcatgaccggttaaccgtttccttgcgtttcttcatatcccggtgggtcacgtcaaccggataatcgaacgataaatcatcagccaatcgttgggcaagcgctactgaacggtgttgcccgccggtacagccaatcgcaattgtcacacttgttttgccttccttgagataacctggcatgatgtcttttaacagcccactaaattgttcgtagaacttttcagtcgctggctgcgccattacatagtctctaaccggttggtctaaaccgtttaattccttaaatgctggcacatagtatgggttcggtaagaaacggacatccatgacgatatccgcatcaattggtaaaccgtatttaaacccaaatgacatcacttcaatatggaatgacggattatctgacgtcttgaagacatgaaaaatcttttctcttaattgtcgtggtgacatggttgaagtatccaccaccatctgtgctcgattgcgaatttcagttaacaggcgccgttctttttgaataccgtccattaaacgcccctccatcgctagtgggtgggaacggcgtgtttccttgtatcgcgaaaccaattcctcatctgatgcatccaagaagagaatcttagtcgtcacgaattgggtattatcaaggttagcaagcatttcaatgatctcatcgtaaaaagcacgtgagcgcaaatcaatcactaatgcaatcttagtcactttgccggactccttaaccaattcccaaaacttaggtagcaatgtcggtggcatattgtcgacacaaaaataacctagatcttcaaaactttgcatggcaacggttttcccggcaccactcatccctgtaatcactactaagttcaatgtatctgtcatcagaccaccccttaagttttcgcttttatcattgtaacattcctggtgtgtcattgaaagctgtcgaaactctcgacacgtgttatttaatgctattaaaccgagttcattcctaatgtctaggcatttgaaagagcttattttttccataaaaaaaattgcagaacaatcaaattgttccgcaatcattaaatttagagactataaacgtcttgcaaatgcgatgatgatggcattaatcccaaagaaagcaaagtaaaaaccaactagggtcaccatcgttacggcagtcaccactggatccattaacaataagatcccaacgattacgcctaagatattcagaatcatcgaaacgatgtataggcctgtgttaaattgcttgagatggccgacattcaataatgccacaattgaatcgaacaagaaccagaatgcaaagatataacctaaagcagccactccagctggaatattcaagataaacaaaattcccaaaatgacatcgacaatggcatcgaccaacattaacgttgcgcgcatccctgtctcttgacgtaaccgactatatgcactgattttggcaattccccgaataatcgccgcaatcgcaatcacgattaccaaaccagataatgtcttacctggttgattaaacaagcaatatgcaacgattaagaaaataatccccgtcataaattctgaccaatcaaagtgccattcattttttctaaacattcccaatcacctctcgttgttaatacctttatgatactttttttacggacaatctacaactaaatttgacaaaacaaaaagtgggcggttaaggcagcaatcattctgtcttaaccgcccgctttttaaacacattctatcaaccatcttctggttaatcctgagcggcaattgtgcgtgctgtatcgcgttctaaaacaggttttaaatattggcctgtatagctttcactgacgttggcaatttcttctggcgtaccggtcgcgacaattgtcccgcctttatcgccgccttctggtcctaagtcaatgatgtgatcggcagtcttaataacatctaagttatgttcaatcactaagatcgtgttaccttcttcaactaaccgttccaaaacgcccaacaagcgcttgatatcgtcggtatgcaagccagtcgttggttcatcgaggatgtataaattcttacccgttgattgtttctgtaattcagaggccaacttcatccgttgggcttctccacccgataaggttgtggcagactggcccaatgtgacgtagcctaagccgacatccacaatcgtttgtaacttgcgggcaatcttgggaatgtttgcgaagaagactgtggcttcaccgaccgtcatgtctaagatttcggcaatgttcttgcccttatagacgacttccaaggtttctgaattatagcgactgccatgacagacttcacacggcacatacacgtctggtaagaaattcatttcaatcttgataatgccgtcacccttgcaggcttcacagcggccacctttaacgttaaaactaaaacggccttttttataaccgcgtagtttggcttcattggtttgcgcaaacaaatcacgaatattgtcaaagacgccggtgtacgttgctggattactccgcggtgtccgaccaattggactttgatcaatattaatcagtttttcaagattctgataacctgtaattgttttatattgacctggttttgctgagttacggttcatcttttgtgccaaagcttttttcaaaatcgtattgactaaggttgacttgcctgaacctgaaacaccagtaaccgcgacaaattcacctaatgggaaatcaaccgtcagattcttcaagttattttcagccgcaccggtcacgcgaatcttcttgccattgccttgacgccgttctagcggtactggaatatattcggaaccggctaaataacggcccgtcaatgatttcggattatgttcgacttcagttggggtcccagcggccatcacttcaccaccgagttcaccagcgccgggcccgatatcgatcaggtaatcagccgcgcgcattgtatcttcatcatgttcaacaacaattaatgtattgcctaagtcgcgcatcttcttcagtgacccgatcaaacggtcattatcacgttgatgcaaaccaattgacggttcatcgaggatgtagagcacgccagataagttcgaaccaatttgcgtggctaaacgaatccgttgggcttccccaccagaaagggtcccggctgaccgactgagcgttaaataatccagaccgacgttaatcaagaaagttaaccgatcatgcacttctttcaagattggtttggcaaccacactgtctttttcagaaagttcaagttgatcgaagaatggtaaagcttctttgatggcgttgtctgaaacggcaacgatatcttggccgcccactttaacagccaaagcttgtcgatttaaacgagcaccatgacaggtttgacacgttaattcagtcatatacgtccgcatttgcgtccgtgtgaaatcactattggtttcacgataacggcggtcaatattggctaatacaccttcaaacggcacgtccacatcacgcacaccaccgaaatcattttcataatggaagtggaagttcttaccctgagaaccatttaagataatgtctttttggcgtggtgttaatttgctaaatggtcgatccatgtcaattttaaatgacttgcaagcttgttcgagcatctgtggataatattgagagctaattggattccaaggcgcaatggctccttcgcgcaatgtcttgctggtatcaggaatcactaaatccatatcgacttctagcttaacccctaaaccatcacagtctgggcaggccccaaacggtgcgttgaacgagaacaagcggggttctaacgcgcccaccgtaaagccacagattgggcaggcatagtgttctgagaaaagtagttgttcgccaccgatgatatcggcagtcgcatacccttctgataagcgcagagccgcttcgaacgagtcaaataaacgggaccggacaccgtctttgacgacgattcgatccaccacgatattaatgtcgtgttttttattcttatccaattcgatatcggcactaacgtccatgacttcactatcgacttgaacacggacatagccttctcgttggattttttcaaatacttttttatgttgcccttttttgccacgaataatcggtgacatcacctggagtttcgtcttctcaggtaacgctaagacacgatcaaccatctgttcaacggattgactactaatttcagtcccatcgttcggacagattggatgaccgacccgcgcccataaaagccggagataatcattaatttccgtgactgtcccgactgtcgaacgcggatttttagacgttgttttttggtcgatcgaaatcgcaggactgagcccatcaattgaatcaacatctggtttatccatctggcctaagaattggcgcgcataagccgataaactctcgacgtagcgccgttgtccttcggcatataatgtatcaaacgctaacgaactcttcccagagcccgacaatcccgtcacaaccaccagtttatcccgtggaattgtaacatcaatatcttttaaattatgcgctcttgcgccatgaatgacgatcttatcatttgccatgctttacctcttttaatcaatttcactcttaatctctaagatggtatcccgtaacgtagctgcctgttcgaagtccagtttcttggccgcattccgcatttgttcagataaccgttctaccatttctagtttttcagctttcgacatactatcgaaatcaatctcgttggtcatcttgacttcttcagggtgttcgactgattgaacaaccgaaatcgcatcccgaactggtttgataatcgtcttcggcgtcatgtgatgtgcttcgttgtaggcttcttgaatcgaacgccgccgcttggtttcatccattgcattgcgcatcgaatcggtaatcttatcggcatacaaaaggacttgcccgttttgattccgagaagcacggccgattgtttgaatcaatgagcgctcgctccgcaagaaaccttctttatcggcatccaaaatcgccactaacgagacttcagggacgtcaatcccttcccgcaacaagttaatcccaattaagacgtcaaacttaccaagccgtaaatcacggataatttccgttcgttccaaagtcttgatatcactatgcaagtaacggactttaatccccagttctttgagatagtcagttaaatcttccgccatcttcttggttaacgttgtaataaagacgcgttcgttcttttcaatccgatcattaatttcgccgaccaaatcatcaatctggcccataatcggccggacctcaatattcggatctaacaagccagttggtcgaataatctgatcgacctgaatatcggtttgttcagcttcataagggcctggagtcgcagaaacgtacatgatttcattgacgtgttcttcgaattcaggtagcgtcaaaggccgattatcaagcgcacttggtaatcggaacccataatcgattaacatttgcttccgggcacgatccccgttatacatcccgcgaatttgcggcatcgttacatgggattcatcaatcatcatgattgaatctttcgggaagaaatcgagcaacgtataaggtggttcccccgccgcacgatcctccatgtgccgtgaatagttttcgatccccgagcaatagcccatttcttgcatcatctcaagatcgtaattcgttcgttgttccaaacgttgggcttccaacaacttgccgtccgccttcaattccgttagtcggccttctaattcagccttgatactcttaatggctttttccatcttttcttcactagtcatgaaatgcgttgctgggaaaatcgcaacatgttcgcgttcaccaatgacttcaccggttagcgcgtcaacttcaacgattcgatcaatctcatcgccgaagaattcaacccgcaacgcatgatcatcacgtgaagccgggaaaatctcgaccacgtcaccacggacgcggaaacggccccgttggaaatcaatgtcgttccgttcaaattgaatatccaccaattgacgcaataagtcattgcgctcaatctccatccctggccgtaacgaaaggacgtgatcttgatattcattcggatcacctaagccgaaaatacatgaaaccgacgcaaccacaatcacatcgttgcgttccaacagcgcactggttgctgaatgccgtagtttgtcgatttcgtcgttaatactcgaatctttttcgatgtaggtatcacttgaaggcacataagcttctggttggtaataatcgtagtaactgacaaaatattctaccgcgttattcgggaaaaattgcttaaactcggcatagagctggcctgccaaagtcttattatgcgaaatgatcaatgttggtttgtttaaattcttgatgacgttcgacatcgtaaaggtcttcccggtcccagtcgcccccatcaagacttgtgcttttgcacccgcctcgaagttcttagttaacgtttcaattgccgctggttggtccccagctggttcatagggcgccactaaatcaaattggttatcattctgtcgttcaatcatcaaaagcctccattaccatttcctagcgataaaagaagacgccgggtagaagttgccctccaccataacgtctacttaccgattttataaagaataatattccttgtcctttaagtcattcactattctaccacaccgaacatactttcgccagagtgctgattaaagagtgcgtcattaagcggttatcctttgaggattagcctaaccagacggattagcgatgcagtcgatgatgcggctggtgtagctaaccggaaaaggatgcttaatgaaagcacgtttcaactaaagtgtggaaacgtgctgttgtcagtagattcctgcgctttgctacacttgtcaaatcgccgcttatagcgtcaattcgccaagttaggcaaatgctctgaatctgagcgactgataacagcactctattccgctagcgtctgtctcactaattgggttagcttccctcgatctgcgaagtcttcactcagtaaatctggcaagatttcttggatgaaataacgggcgcatgcgagattttggtattgcataatcgtttttaaactttccgcaaaaatttctagaaaagcattctcaggattacctttttcaatttcaccaaaagactcgtagagtaaatcaatcttatcggcaacggctaataattgcccttccaaagtttcatcttttccttcactcaaacgacgttgataccgttcttgtaagaaatctggaatttcatttttaatgaagttagcggttaatgaactttcgacattggccaacatcgtccgcaattcatgcgttgcgtatttgaccggcgtcttaatatcgccgataaaccgttccgtataatcgtggttcagtgcgcgttcgtacagcacttgccaattaatcgtttgcccattttcttcttcaatatcgcctaataattgcgcaatttctgctactttaaaggagtgcgctgcaacggaatgttcttgatatttaaacaatcctggtgcgcgatttagtgtctccaaattattcaaaccttgcaaatattgatgcatacccataccaaactacctcccttttcttacaaaaatagaccgactaacgcagtagtccgtctatttgctgttctttattataggtaagttatcctgaaatgtaaaacagaagccctatctattttacaagttcatgaattgctttttcgaagtttgctaacttcaaatcagctgttgcggcatcatcagcggatgtccccacatagaatttcacttttggttcagtcccacttgggcgaatcgcaatccaagtgccatcttctaagtgatatttcagaacattagatgttggtaaattgatgggttcagtatgaccgtccgcaaaagtttctgtttgtgtttggaagtcttctgctgaagcgactttgatgccggcaaattcaactgggctttcttcacgacatttaaccatcaagtcagccatttgttgtgggccattgaccccttcgaaatcaactgcagtcgtttgttcagcgaagtagccgtattccgcatataattcttgaatgccatcatacaaagtcttaccgtttgacttgtaataagctgcaacttccgctaataagaccaatgtttgaatcgcatctttatcgcgaacgaatggtttcactaagtagccatagctttcttcgaaaccaaacatgaaggtgttttcgtctgtgtcttcaaagtgttgaatttgttcagcgataaatttgaagccggttaagacatcaatcatcttcacattgtagctcgctgcaatcttcgttgccaattctgttgacacgattgacttaacagccgctgcattggctggtaatgtgccagcatctttactagcttgtaaaatataacgtaataaaacagaagcgatttggttcccagtcatcaattggtaactcccgtctggttgacgcacagcggcgcccaaacggtcagcatctggatcagtcgcaatcaacaagtcagcttgttgtgctttcccgagctcaatcgccatatcgaatgtttgtgggaattctggattagggaatggtgtcgttgcaaattctggatcagcaactgcttgttcagcgaccattgtaaattgttcaaagcctgcttgacgcaatgcgcgttcaccaagtactttcccggtcccatgaagtggggtgtaaatcaatgacatggtcttgccgactgtgtcgaccaattcttgattaatcgtgacttgcttaacttcagctaagtaagcttgatccacattttcgccaatcaaagtcattaagccggcttcgcgcaatgtgctttcatcagccacttcaatcgcaaataaatcggttactttgcgaatataacttgtgattaaatcggattccttaggtggcatttgtgcgccgtcttcgccataaatcttgtaaccgttgtattgtttaggattatgacttgctgtaatcatgataccggcataggtatgtaagtgccgtacggtaaatgataattcaggtgttgggcgtaaggcatcaaaaacaaacgttgggatttgatgttgacctaagacccgtgctgcttcgtgcgcaaatgtttcagattgataacgtgaatcaaaactgatagccacaccgcgttttttagtcgcttctggtaatgtttccatgaattgagcgaggccttctgtggcttgacgcaccgtataaatattcatgcagttgatcccagggcctaaaataccacgcatcccagctgtcccaaattccattggaacgctaaatgctttttctaatgcatcatggtcgtttgccatttcgttaagtgctttttttaaaggtaaatccatttctgtttgattattccaaattgcataattatcttgccagctcattgtgtaacccccgcattttagtctaaaagctagttctaagtataccataatcaaccgctttcctaaagcatcggttgtacggtaatgcgcaccaagctaattgtctgggtcgattatttaataatgcttgtccttctaaaaattaaaatttttcccaaaataaaaaaacggccgactacaatttagtcgaccgctggaaatgtgcgtcataagccacatttttaggttaatcctcaaaaataaaatcgtttcgaacgcactctaatcgtgcttcctcgaactgtcttttctgtgttaatcctcggaagctaaccggctgccgtcgcactctagatactttgtaaatatttaaatacttcttggcctgctatgccaccgtcgccaactgctgttgtgatttgccgtaaatctttttcgcggacgtcgccgattgcgtagatgcctggaacactggttgccatgtggtcatccgttttaatccaaccggcatccgttagaatccctagatcaccaaaggcactagtcattggttcaatccctacatagatgaagaccccacttgcagcaacttctttggtttcaccagttaccttatcaatgtaagtgacaccggttaccttcttgtcgtcaccttcaatagttgtcacttgtgcattccagatgaagtccatcttgtcgttagcaaatgcacgatcttgtaaaatcttttgagcgcgtagttcatcacgacgatgaatgactgtcaccttgctggctaattgcgtcaagtagaggccttcttcaatcgctgaatcgcccccaccaatgaccacgacttctttattcttaaagaaggcaccatcacagaccgcacagtatgatacaccacggccgccgaattcatcttcgccgggaatgccaatcttcttgtgttctgaacccgttgcaatgatgattgagcgcgcttcaaagtcgccttcatccgtgtgcacgagtttcatctcgccttgcagttcaatcgagttaaccgtgccatagccatattcagcaccaaattgagtagcgctggcatacatcttttcgcctagttcagggccaaggattgatttaaagccgggataattttcgacctctgccgtattattcatttggccaccgtaaatcccgcggtccaacattaatactgataaattcgcacgtgaagcgtataaagcagcggtcatcccaccaggtcctgcgccaatcacaattacatcataacttttagccatgtctgttatctccttacttttgaaaagtactcgttcttcttaaaacgtatcttacccgttatgtaaaaaaaagtctaccaaactgttttaccagtttgatggacttgttagttttaattcctgtagtaattcagtggcttcggcatcaaaatccgaatcgtcactttgtaaataagcagtcgcgagttcgtagctcgcctgcgtctgatttaaaaaggcatacgctgttgctaaaaaatattgtaactcaggatgactctgatagttggcggttggaatttcttccagaacggtcgccgcaccatgatagtcgccaaccgattccaaacaaatcgctaattggcacaccacaaagatgtaatcatctttggtcttagccagcgactttgcccgttgtaaacacgttaatgcgcgcgtgtactgaaatcgttcaaacgcctgcatccctctgtcaaaataaaactcacaagttggtcttacagataccaaatcgcccataaagtaatcggttctcctttagcctttttctcaacgctaatcatcataacacactctgatgatgggtgcgatacccattcaaaatgatgccgctttattcgttaaaaagttttagacttcatcaaaatcgatttcaggtttacctgaacgccgcattaaatacgcaatttcagtcttaatatcacaatcttcatacaatacattatagatggcccgtgtgattggcatatcaacagaacgttgttgagccaattcataggctgctttacatgttgcgaccccttcgacgaccatccccatattggctagcacatcagctaatttttgacctttaccaagtgcatttcccgcacgccagtttcttgagtgaacactggtcccagtcacgattaaatccccaacaccggataatccgataaaggttaatgggttagcccccatggcaacgcctaagcgggaaatttcagctaagccacgcgtcatcaaggcggccttcgtattatctccataaccaagcccgtttaaagcgcccgcgccaagtgcaatgacgtttttcaaagcagctcccatctcaacaccaaccacatcagggttggtatataagcggaaataatcattcatgaaaatctcttggatccattgggcttgaatcaagtcacttgatgcggcagttaaggtagtaatatctttttgtgcgacatcttcagcatgactaggacccgataaaacaacaatcccattgcggttggtttctggaatggcttctgtcaagacttctgaaatccgtttgtgcgtgccttgttcaagcccttttgaagccgtcacaatcacgggtttcacttttttcgcaatcatcacaggaacaatctgttccgccaccgcacgaatcgcttgtgttggaattacaaacaagacaacgtcaacttggtcaagtgcaacgttaagatcaatcgttgcgtgtaactggggatcaattttaaaatctggtaaataatgtgtattggtatgctgttcatttatttcagcgacttttttaggatcattgccccacaactcaacttggtggccattttccactaataagtttgctaagatggtcccccatgaaccggcccctaaaactgcaatttttactgtcatctgataattctccttttaaacaaatctctatttctgttcttttgcttgattgccggttaaataatccggtaactgactgtgcttacgccgccaaatccaaagaccaattgcaccaaagaataagacgagtgagacaatctgcgatacccgcaatggaccgatgaataaactatcagtccgcatgccttcaatgaagaaccggccaaacgaataccaaattaaatagctaaataagatttcgccttgtttaaaccaaccagttcgatggcgaatgctcatgatgataataaaccctaatacattccatgctgattcatataagaatgtcggctgacgatacgcaccatcaattaacatctgttggatcacccaatcaggtaagtgtaacgattggagaaagtgcaatgttgttggcgccccataggcttcttggttcataaagttgccccaacgtccgattgcttgtgcgatcatcacggttggtgccgcaatatccaacactaaccaaggcgatagtgcatgacgccgacaatagataatgaacacaatggcagctgcaatcagtccaccgtaaatcgcgatcccgccgtgccaaatctgaataatttcgccgggattggcttggtaatacgaccattcaaaaacgacgtaatacagtcgggccccaattaaggcaaatggtaatgcccataaaattaaatttaaaatatcatcttcactgacattgcgccgtttagcttcctgtaatgccaatccaacggctaaaacgaccccagttgcgataatcacaccataccagtggatctccaatgcgcccaatcgtaatgcaatcggatttaatgcgcctaatagtagattcaaattattcgctccttttgtaaatgtgctttcatcaaaacgtacttttcaagctaaatttctgcgcttagcgtcgtgaagcaaacaatcgactgcgtcgcttatcgcttcactgtgctaatgcgcaaaagttggacaagcttgaatgcactcttatccaaaacgtgttccgtaagccatatccttccggttccccctgaatgtcaaacgattgctgacgcaatccttcgccattctgtgttaatcctcaggatatacccggcttactgcgcactctaaaaaaagactagtttgcatactgtctttctaacagtatagctcaaactagtcattagacctaccatatttaacgaacttttctgacttttaactattcttcttcatctgaattggcttcaattaacttgcctagattggcttcgaaggtcttcgttgcatcatagcccattgattttgcccggaagttcattgccgccacttcaataatgatggctaagttccgcccgactttaacaggcacggtaatcttcggtacagggacgtcgaaaatcatttgttcttcggtatctgaccctaagcgatcatatttcttatcctgtgaccaattttgcaagtggacaattaacgaaattgacgtttcagcccgcaccgcaccagcaccaaagaggttcatcacatcgataatcccgatgcctcgaatttcaagtaagtgacgcaaaattgcaggtgcttcaccgaccacggtttgttcatcttgttgataaacgtcgacccgatcatcagcaattaaccgatgacctcgtttgactaattccaatgccgtttcgctcttcccaacacctgaatcgccagtaattaaaacacctaaaccgtaaatatcgactaacacaccatgcattgagcgccgttcagctagctttccttccaaataatcggttactaaactcgacaaacgcgttgtcgataaattcgaccccaacacaggaattcccgcttcttcagctgctttaagcatttccattggtggttctaattggcgcgagaccaagaaacagggcgtatcttcagaagccatccgacgcataatcattaaccgttcttctggtgtcatattttgcgtaaatgaaacttccgtccgtccaaataattgcacccgctcgtaagggtagtaattaaagtagcccgttaattcgagtcctggacgggaaatatcactcaccgtcactgctttattttttaaatgtgcttcaccggcataaacttgtaattttaaatcggtgactagtttttgaattgaaacactatcagccatgagttacccgtccttcattttcacttatatcctctatcatattgcttttaaggtgatttttcaactttaatgtaggcgttttcttatctaaacaaaaaaaacgggaccaatgtcaatcttaattgacgtcagtcccgctaactttttaataacgctctctcacaaattgatttgtaataatcgtattggcaattgataagatgattgccacgatcacggctgctccaaaacttgtgaagctaaagtgggcgccgacgaaaacagcggtcaattctaacataatcccgttgatcacgacactaaacaagccgaacgttaaaaacgtaattggaaatgagagtaagctcaacaatggtttaataaagatgtttaaaatcgataacacaatgctggcgactaacgcgatccaaatgttttcaacatagaataaattgggcaataagccagaaatcgcaatgaataacaaagtatcaacaattacgcgtgtccaataccgcattagaaatcactccagtcatcatcgtctactttgacatcacgagcttccttgcgttgacggctaccttgatgtgctgtttcttgataagaatagtcttggtagtcatggcgccagtctgcatgccgtggacgtctacttgggccagcaattgcccggtagatgaagctgacaattaacccaatcacaatcagtggtagcgcaaattttaataataacagtagcgagccaatcacgagactaaacacgccaactgccgccataatggcgataatgactaataaaatcattaaaaaaggcattaaaactcactccattcactttcagaatcatgtttactctgacgtggccgttctggaatcaccatcgctaagatgatgtagaccacaatcccagggaacgctgctgaaaacattgagaatacaacatatagaattcgaactaatgtcgcatcaatattaaaatactcagcaatcccgcccatcacaccagaaatcattttgttatctcttgatttataaagtcttttccccattgttaaaacccaccattccttaattttttagttatcgttgtctttcaataaaatattaccagttgtcgtgcttaatgttaaacgagctgcctgttcattgtcgttacggccaagttgtaacatttgattccccgtactttgccgttgttcgatggtttgggtgtttgcaagccgatttttaatcatcccaaaacgcgtgcgggcatcaacagtcattgccaaagtttgtggtaaagctgtcttgattgtgccattcacagattttgcttttagatgttgtaaatcagttgtcgtcaaagtgttcttgatatccccgttgaccgttgaaacactcgcatttaaaacttgcgcttgaatcaataggttcccgttgaccgttgttgcgagtaaatcatcgtaacgaccttgatcaaaggtaatgccaccgttgacgttttcagcttccaccattgcagcgttggtgctgattaacgttaattcaccgttagtcgtcttcaagtaaatatcccggccggtaaagccatctaattcaacatccccgttcaataacttcacattcgtttgtaagtagttattggctggtaagtagaacgttaagtccgcttgaatccgtttattcggcacttggaagaccaagtcggcatcagtcacatcaattgtactgcgcgcttcaaaagcagccaatggtgttgcttctgccattttaccatataacttcacttgcgctgcgactttgacttctggacgatcccagatttggaaatgtacactaccgttagccactttgacgttaatcatttctggtgttacgtcagaataaacgaattcatggctgaacttttcagttgccaaaccaggcaccttaaagtttacttctttccaatccacattatccatgactgttttggcagtattcttcacgaacttaccaaagtgtgtgctagcttcgcctaacttatcgctcaattcatcaaatgtttcactggcattttctttccagtcatctgataagcctaatttttctgaccattgatttttggtcatttggcggcgttctttttcgatttggttgagttcatccgtcaatgcttcgcgtttggcttccaactcgtcgacttcagcttgcttttgtaataagccagccttgagtgtttgccgttcggttgctttttcactgcttaaactatctaaatcttccatcgtatcaaggacagtgacttgttcttgatcagcgtgcattgcttgcttcaaatcttgcaactgccggttaacgccggaaaggttaacggttaattcgtgtgtcttttcttcaattgcgcttttatcagcggttggttgttcagtttgctccgttgctgtttcagttggatttgattttacatcttggtcatttttggctaaattttctaataagactaatgcttcttctgaagttaaaataccttggttcactaagtctaaaattcgttgacgttcattcattgttttgacctccattgatcattcgttgtactgtttcacttgactatgactctattatgccgattttacagtcgattgtcataggtccaaaggttgatttttatttaggtatcaagagtgagaacaaaaaaagcgcaggacaaaattatttttgtcctgcgcttttttgcttaaacgatttgtcctgtgtaaggttcgccggcgacaaattggaaatcaaaggttgctaattcatccacactggttagacattgggtaatccctttagccaacattaggttgatgggattggcttgtaaatcatcttcacaaacaaagacgattggtttatgacaggcattcaagtagccgacttcaaacgccgttcccgtatcttcgtcttgcatatcccataacacaactgccatgtctgctaaatccattgctgtgatgtcgttttgatacgtttggttggcccattcgtaacccccgaacatgccttctggatcatgatcttctgtcacacccttgtattgatgctcctgtggactatgaatataaccaatcgttgggttttgttttaaagccgcgtgtgcgcgttccactaatgaggcctgtttaggtgtaaaccaaccgccagctaagtatatttgtttttgcattatgattctcccactaaaaaagcgacgagcaagtcgaccttgtcatcgctttttaaaatttttaattgaattgtttagaattcatcttcttgtgcattggagtttaattccactaccttaccggttctgaggtagacaatccattcacagatgtttgtcacgtaatcgccaatccgttcgaggtagcttgcaactaacatgtagtccatgctcccaacgacggtttctgaatcacgttgcatttctttgatacagtcgtcataaatattgtctgaataagcattgattgcaacatcttcatcggcaattttgatggccttcttacgatcttctttgacgtaagcgtccaatacctcttcaaccatttgtttaactttgtctgccatatccgcaatatctttttcgatatcagggacacgggtattacccttgacccgaatcgttgatttcgcgattgaaacggcgtggtcacccatccgttctaaatctgaactagccttcatgattgtgacaatcacgcgaaggtcagttgagaccggttgttgaagtgcgattaactcaaaactcttacgttccaaatccgtttcccgttcattaatcttatgatcgtcagcaatcacctcgcgtgcgagttgcttatcgtgattaatgaaggctttaacagatttatagatggcttcgttgaccatcatccccatttcggagaagcgaacgtgtaaatcatttaactcatcttcaaaaagtcgtctcattgtggtttcccttctttcttagccaaaacggccactgatgtaatcttccgtttctttttcggttgggtttaagaaaatcttcttcgttggtgcgtattcaatcaattcaccttgtaaaaagaatgctgtcttatccgaaatacgagaagcctgatgcatattatgcgtcaccattataatggtatactgttggcgcaattctagcaacatattttcaattttagcactcgaaatagggtctagcgcagaagtcggttcatccattaagatcactttcggtttcacagctaacacccgagcgatacaaacccgctgttgttgaccaccagaaagtgataaagcactttcgtgtaacttatctttgacgtcgtcccaaacggccgcttgtttcaaactactttcaacggcttcatctaagacgcgatgatctttaacaccggataaacgtaagccgtaaacaacattgtcatagattgaaaatgggaatgggttcggttgttggaacaccatgccaacttctttccgtaacttaacggtatccatctcaggcgcataaatatcttggccattcaataagaatttaccggtcaccttcgccgagtcgattaaatcattcattcgattcaagcagcgcaagtaggttgatttcccacaaccagatggcccgatgagcgccgtaatttcattttcaacaaaatccatattaatcccttttaaggcctcattcttaccatagaatagatgcacatctgaggattcaataatcttatttgccacggggcaaacctccttgcgtcctagccaaagtgaccagaaacataatcttcggccgctttaatcttcggccgggtaaacattttacgtgtttcgtcgaattcaagtgcgtgccctgaatggaaaaaggccgtgtaatcactgattcgtgctgcttgttgcatgttatgcgtcacaatgatgattgtaaattcttcttttaagcgaatcaatgtttcttcaaccgtgttcgttgaaattggatcaagagctgaagccggttcgtccaataataaaatatcgggtttcatcgcaattgcccgggcaatacataaccgttgttgttgcccaccagatagtgccaatgcgctctttcctaatgaatctttgacttgatcccacaaagcagcttgttttagtgacgtttcaaccacttcatccagatactttttgtctttttgtccatgttgtttcaaggcaaaagtgatgttgtcatagattgatttggcaaatggattaggccgttggaacaccatgccgatatgttcccgcatcttatacacatcaacgtcatcgctattgatgttcaagccccggtacataatcttaccggtcacacgtgtattagcaatattgtcattcatccggtttaaactccgaagataggttgactttcctgaaccagaagcgccgattaacgcggtaattcgatagcgttcaaattgcaatgatgcatcgtgcatcgcgcgtttgtcgccgtaatagacgtttaaatcttcagttgataaggcaatttcatgttttggttcatctaaatgtttgatgtgcgtttttgttaaatcgtaatctgccattattttctcctatgctgctgtcattttacggtagacacgcttgccgatgacccgtgctaaccagttaaatagtaaaacggcgatgattaagacggcagatgcgccagcagaaaccgcagtcgcatccggcataatcccttccgagttaatcttccaaatgtgcaccgctaatgtttccgcaggtcgcaatggattcaacggactcgcgatgtacattgggttccagttggtaaaatcaagtgatggggcactttgtccagctgtataaatcaaggcagccgcttcaccaaagacccggccagcgcctaaaatcatcccggtaataatgttgggtaacgcttctggaatcacgacatgcttaaccgtttcataacgcgataaaccaagtgcaagacctgcttcacgttgtgtgaagtgaattgattttaaagcatcttccacattccgcgttaacaacggtaaattgaaaacggtcaaggctaaagcacccgctaagattgaaaagcctagcttaaactggataacaaagaccaagaaaccgaataacccgaccacgacggatggtaaggaacttaacacttcaatcgcggtccgaacaacattcgtcacccagttcttcggcgcatattctgcgagatagatgccggcaccaattgataacggtactgaaatcaccatcgccaaaattaatagatagaatgaattaaacagttggacgccaatcccgccacctttagtaaaggtttgcgcaggtttcgttaaaaactgccacgtcacgtgtggtaatccgcgcaccaagatatagccgagcaaacttgctaataataatacgatcaaaccagcgatgagggttagcacaccggtggcaactttatcccatttttttgcatccattagcgacccattgctcccttccgaccaattaaacgaactaataagttaaatagtagtgacatcaataataagagtaacgccaatgaccaaagtgcattattggctaatgaacccatgaccgtattcccaatgcccatcgttaacacactcgttaacgttgaggctggggtaattaagttatgtggtaataacgcagcgttcccgatgaccatttggacggccaatgcttcaccaaacgcccgggccatcccgaaaacaaccccggttaaaatccctggtgtggctgcttttaaaacgactttccatgttgtttgccaacgcgttgcacctaaagcgagtgaggcttcgcgataatgccgtggcacactcttgagtgcatcgactgtcatcgatgtcacagttggtagaatcatgacgaacaaaacacaagtcccggcaagaatcccaaagccactgccaccaaacaaatgacggacagctggtacaatcacggataatccgataaacccgtaaacaactgatggaatcccaacgagcaattccatcactggttgcaataatttttcaccccgcttaggtgagatttcagtcataaaaatcccagcgccaattgcaaacggtgttgctaataaagccgctaagaaagtcactccaaatgaccccataatcattggtaaggcgcccacttctggtcgaccatgactatctttcaaacttggattccaattagactgcgttaaaaagcggcctagattgattttatctttaaagaaggtcgctaacccttttgaagcgacgaagtagaaaatggcgagcacgatgaacacgattaaactaatacagaataaactgattaatttgccccgtgtttcacttttggctgcgcgtgatttcttaagtaaacttgctttaattggatccataattggccccctacttaacctttgtaattgtgccatcaaccgaccgttcaaccgtcatcttagcaactggaatatagcccatcttgccgacttgtttatgttgaacctcatctgataagacatacgccaagaaacgttttgttaacccagttggttgccccttggtgtaaacatgttcatatgaccagattggccatgcattagtcatcacgttttcatcggttggtgcaatgccgtttaatttaaccattgcaatcgaatcatctacgtatgaaaaagcaagataactgatggcccctggcgtgttcgctacaattgatcgcaccatccccgttgaatcttgttcttgagcgggtttagtcttgcgcgacttcatcacccattgttcaaacgtcgtccgcgtcccactaccttgggctcggtttactaaaacaaccggctgatctggtccaccaacgtcttgccagttatcaatttcgccactaaaaatcttcgcgagttgcgtcaatgttaagtttttaatccctaattgcttattaatgactggggtaatgccgacaacagccacgcgatgatcgaccagcttgtccgctttaatgccagccttttcttcagcaaataaatcagaattccccatctgtacagcgccagattgaatctgactcaagccagtcccagaaccgcccccctggacgttaatgaactgaccgctgtgatcagcactgtattgttcagctaacgcttcaatcagcggctgaagggctgatgagccgaccgccgttacggactgaccattttgtttagactggcaaccagccaatagtaataaactgaatgtgactaataagccaataacattacgtttgcgcatgttaatcctccacgaattccatttaaacctcgtaagttccattataaaaaaggtttgtaaaaactaagcctatcaaatgtaaattttgtgtaaatcaagcgtttggtagcttcaaaatgaattcactaccgacacctaattgactctctacggtcaactgcccctctaaactggcggtaatctcgctagcaattgctagtccaaggccggtcccgctcttatgggtcgcgcgcgcttgatcaacccgatagaatcgttcaaaaattctttcttgtaggtcacttggaatgcccaaaccggtatcgacaacgcggataacaatttgatctttttcaagttgcacggcaatcaccaacgagccgttttgtttattatacgtgatggcgttagcgattaggtttttcaagatttgattaaacttcattttctgaattctaatcgctaaatccgttggaatatcaacggagacgtgtaactgcttttgttgtgccttttgttgcatcagttcgagattagcctgcaccaattcacgtacattcacaagttgctcttgcgattggtccttacgatctagatgcgaaagcgccaaaatatcttgaatcagcgcagttaatcgcgtactttcgtcatagatgatttgtaagaattgcttttgcgtggcaggatcttccgccgcaccagctaacaacgtctcagcaaagcctgtaatagccgtcaccggcgtcttcaattcatgactcacattgctgacaaaatccaactgcatctgctcaacgcgccggacatcggttaaatcatataaaatgactaatgcttggaatttcgatttaaccgtattgagttggacaacattcgcatccacaaaccgttcttgattttgaatcaactgaatttcttggtgatgactctttcggtacctaaaagtgtgctcaatcatccgtgttaattcatacgtcttgatatcatcaatataggggtgtttctcagtaacaatcgtcgtctccaataaccgatccattgcttcattgtgcaaaacgacttcacgattttcgttaatcaccatgacgccgaccggtaaatggtcaattaggcggtcaaaactgccctgttgcatggcaatcttctgccgcatatgccgcatatcaccatttaatttattaatttcttgcgcgaggatatataatgacgcatctttttgaaaaataatcggttcgggcacttcttcatgccgaatatgatgaatattagcgactaaaattttcaagtggtcaaagaaatgacggcgttgccgccagaaacggtatagaaaaatccagctaccgattaaatagacaatcgtgaccgataaagcaatcttcggccacgtatgccagaactgttgctgaggcactactaagacaaagttgggccgatctgcttggtgtgcgtaaaacaaatacggttgcttattaactgtttgccgcgtactaaaattggcggcagaatgattccgattgacaatatccgtcactgctttttgcaactttgttttattcggcgattttggcgtcaaaacttgtaagccgttttggcgtaaccacttttgccgatcaaactgtggttgtttgatgattagcgcatagtcggcgccccgttcctttaacatcgcgtcttgttgttgggcaatcaccaaattgacaagcacaataaaacctatgtaaacagccactaaaatagtggctagctgataaaatctaaattgatcatgtttggtcatggttggggtcctccaattgataaccgaaaccacgcaccgtttttaagtaaactggatgacgcggatctgtttcgattttttcccgtaaatgactgacttgaatatcaaccattcgcgtttcggctggataatcaaagccccacaccgcatttaagagtttctcacggctttgaaccttgttaatccgatgcataaagtaaacaaggagttcgaactccttaggcgttaaatggagcttctgagtgccctttttagccacaacttcgccttcatcgaccattaagtcccctacttgtaaaatatcactagggtgcgtttcaacgactgctacaggctgtgccgtccgccgttcaattgcccgaatccgcgcgataatttcgcgtggactaaatggtttagtgacatagtcgtctgcccccacttcgaggccgacaattttatcggtttcgctatccttagccgttagaatcataatcggcgtttttaactttgcctcccgaatcttcttggtaacggtaattccgtctagcttaggcaacattaaatctaaaataataaaatcaaacgactgctgtaaagccatcgtcagcgcttgtgcaccgtcagttgccgtcatcactttaaaatgttcttgttccaggttatagcgtaataatgtcaagattgctggttcatcgtctaccactaaaattgtcttcattcatgccaccctttatttacttaattctctgggaataatacaacgcctaactcatgtggtgcatcagcaaaaattgcgccttcagccatccggaactcaccgtttaaatcttgaacctttaaatggcaatacgttggctgactttgaatcgcccgataaaaattatcgttatttgagacagcctcgccattacattcaacaattgtatcgccaacgaccaaccccattttagcagccggcgtttcgcgtaaaatccctaagataaagacgccatcgtagggtttcgtaaagtgcaactgccgttcatgggcactgcgtctactcaaccgccattgtaatgcacagcttagtactagcgcaactgttaacatgccaataatccagttcggaaatgcaacggcaattaacccaaacccaactaacaacaagccaaagatcaaatagctattggcatttttagtaacaactgatttcattaagcctttgactgctttcaaactaaatcccaataacaatggcaagattaccaagctatatgattgatgcccgatatttaagaccggccaaaaacccaaacttggcatatcaattgcccctggcactaagaaaaagaccggcgcaatataaatttgtcgactcataaagaaggccgtcaaccgccctcgcttgctagtcatcacacgcggtgtcacagttgcctcggcatcccaacgttgtaaaacactattgatgacggtcactaacccaataatcaccaataattcagccaaaagacttgcttgaccttccatctgatattggggccatatgaatgttgcaccagcgtagaccaaagcactgattaaaaaggttgccgatacgttttgccatctagcagccactagcaaactcaaaatagcgattagttgatagaccagccaccattgcatattaaccatcgcccctaacactaaggtacagcaacttaagactagccctgcgagtagcccatggcccacaaaatggcccacttctatccatcgtggattaatcgcaattctaaaggtcttccgttccaagctaattcgtctatgcgctaaccagccagcatacacaatcgctaaccataaaagtggtgccgttagtaatggtcgcaaaatatcaatgatcatcgtcaattcaacaaacccccagcgtctatatttaaataccgtgcgtgtttccaacgacacacgctcgatttccagctgccgaatttcgcagttatcccaatcagtatagcattttgcccccttaactgcctagggttcaaaaaaaaagagtgacgaacaatttaatgttcgccactctttcactaatttagtttaaattttaaggaaacgacgcattgagatgacagaacctaatgccccaatcacaatcccaatcacagccattgttaaatcaagttggaataagaaaattcctggtttcaacattgaataaccggctgaagccatgctgagtgccatatgacggtaaacccaaccataacctaagtcgattacaataatgggaataattaccccaagtaatccaacccaagccccttcaaaaaggaatggccagcgaatatacgcgttagttgccccaactaaacgcataattccgatttcgtcgcgccgcgataaaatcgtaatccgaattgtattggaaatcaagaacactgccacaaagagcaataataaagtaaaaccaacgccccatttacggacgctactcattaccttgaacaacttcttagcgttgttcccaccataagtggcatcataaacgtatttcaattttttcgcttgtttagcgactttaatcgtttgacttggttttgtcgtacttactgtgtaaacatcgtacaacggattatcgtctccggtaaacatcttaaatgattgaccgtaactgccgacaaccttgtttaattcctttttacgacttgaatacgtcacttctttaacagacgccattttttcaagtttcttttgtagctgatctttttgtttacttgttgtgccccgttcaatcataacccgcacgtgcacatcattttcaatatcttgtgaaatcttgttaaagttgaagatcatcgcaaagaaaatcccgactaataacaacgttacggtaactgcactaacagctgcgattgacatccagccatttcgttttaaactcttaaaactatcgttgatatgacgcttcaatgttctaatcttcatagccgtagtcaccttctttttcatcacgaactaagcgaccgtcttcaatcgctaagacacgatgggtccgttcgttcaccatttgtttgttatgggttgccattaagacaatcgtcccacgttcattaattgcttctaaaatatccataataccatctgacgtttcaggatctagattccccgttggttcatcggcaatcaacacatctggccggttcacaatcgcacgtgcaaccgcgacccgttgttgttccccaccagaaagttcatttggaaagcgacgaatttcacccttcaagccaactagttcgagcacttctaatacacgatctttgattgcttgaggttctgcctcgatcacttccatggcgtatgccacgttttcaaacaccgttaaacgtggtaataacttgaaatcttggaaaacaacacccatcttacggcgtaagtatgggacatcgtgatccttcataccgattaaatcaaaaccagcgacttcgatttcaccactcgttgcttttaattgatggtacaacatcttaatgaatgttgatttaccagcaccactgggaccaacaatataagcaaattcgccgggttcaatcgttagcgaaagatccttaattgctgtcacgccatttggatacttttttgacacatttgtcattcgaatcaattggggacactcctttttttgtcgttatcattatttattgtcaatgaaaaccgcaatcttttatattatagcatgctatttattcaaataatcacaatttgattacatttatatttcaatttctttgcagctagtcgggattcttctgactcaactgccattgcagataggcatacataaatggatccaaatcgccatccatgactgcttgcccgtttccggtttcgtagtcggtccggtggtctttaaccatcgtgtacggatggaatacgtatgagcgaatctgtgagccccagccaatttcaagctgttcgcccttaatagcagccgcttttttcgcctgttcttcttgttctttttgatacaatttagccttcaacatattcatcgcagtttcgcggttttgcaattgcgaccgttgcgcctgtgatgaaacaacaatcccagttggtaaatgcgttaaccgcacggctgatgatgttttattgatatgttgcccaccagccccgcttgaacggaagacgtcaattcgtaagtcttcggtgcggacttcgatatcaatcgaatcatccaattccggcatcacatcgactgaacaaaacgaggtgtggcggcgcccagctgaatcaaacggtgaaattcgtacaagccgatggacccctttttcagaacgtaacatgccatacgcgttgtgccctttaatcatcaaggtcacactcttaatcccagcttcttcaccggcctggtaatcttctgtttcaacggtaaagccgtgtgcatctgcccagcgtaagtacatccgcaaaagcattgaaccccaatcctgagattccgtaccaccagcaccaggatgcaattcaacaatcgcgttattgctatcgtagtcgcccgatagtaattgtccgagttcatattgttgcatctgagcttgaacagccgtcaaatcagcttcaaaactcgtctggagttcagcatcgggttcttcttgtaatagctctaatgtcacttgtagctcttctgattgcgcttgaagttgcataaaagcgtcgtatttttcctttatggcgttattttgatcaattaactgttgggctgctttttgatccgaccagaaatcgggatccgccatttgcgcttcattttgcgcgatgctttcttgcaggccatctaagtcaaagtgaccccctaaattgcgttattttagcttcaattgcttctaaaagatgttttgcttcacttaattccatattttagtccctccactattttttcccattaaaaaatggctaagttaactacctcagccattttctacgcgttagcgtcgaatattttgacggatttccgccttcatgaagagccgggttgtatcgtaatcgatgtcgctgatcatttcttcaaacatccggtaaccttcttcttgatattcaaccaatggattcatttgaccgtagccccgtaatccgattgagttgcgtaattgatccattgcatcgatatgatcggtccagcgttcatctaccacacggaggataacgactttttcgaattcgagcatttgatctgcatctgctaattgtttttgttttgttgcgtaattcttttctgcaaaggtcatcaataatgattcgatttcttcagcagtcttaccttgtaatttttcaattggtaattcttcttcactgaccattgaagttgtggcaaatgcgtggattgcttctaattcccagctccccatttcaccttgtgtatgcaattgcacaatccgtttaacggttcttgaaatcattggcatgataacttctttcaaattatcttccgccatgatgacctgcatccgttgtttatagatgacttcacgttgttcacgcatcacatcatcgtattgaagggtttgtttacgtgtatcgtagttattcccttcaacccgtttttgtgcggcttcaacttgacgcgtaatcatcttactttggatcaccgcatcgtcatctgaaatcttcatccggtctaggaaggctttaatccgttctgaaccgaaacgtttcatcaagtcatcttccaatgacatgtagaattgtgtgacaccaggatccccttgacgaccagcacggcctcgaagttggttatcaatccggcgtgattcatgacgttcagtcccaataacagccaaaccgcctaaatccgtcacaccaggtcctaatttaatatcagtcccacgaccagccatattagtagcgatagtgaccgcaccacgttgaccagcattcatgataatttcagcttctttaaagtgattcttagcattcaaaacagcgtgtggcacgttattttcatctagtaatcgcgatagtaattctgaagattcaaccgcaacggtcccaaccaatactggttggcccttagtataacgttccttgatatcttcaataaccgccttaaatttactttccaaagttggataaagcacatctggtttatcgattcgggcaattgggcggttagttggaattgagataacttccatgttgtaaatttcgcggaattcttcttcttcggtcttcgccgtcccagtcatccctgataacttgttgtacattctaaaataattttggtatgtgatattcgccattgttttggtttcatcttggatttcaacgccttctttggcttcaatcgcttgatgtaatccatctgaataacgacgaccatccatcacacgacctgtaaattggtcaacaattaggacttcgccttcttgaaccacataatcaatgtcttttaacatgatatagttggcccgtaatgattcgtccaaatgatgcgtcaaggctgtattttcagtgtcatataaattgtccaagccgaagttagcctcagctttttcaatccctgattctgttagactgatggtctttgttggccaatcaatcttatagtcagtttcttcttttaaagttttaacaaaacgatcagcacggatataaagtgctgttgacttttcagcttgaccagaaataatcaatggtgtccgcgcttcatcaattaaaattgaatccacttcatcgacaatggcaaagttcaatggtcgttgaaccatttcttctttgtaaaccaccatgttatcgcgcaagtaatcaaacccaagttcactattcgttgaataagtgatatctgagttgtatgcgtcgcgtttttcttctggtgtcttagcatttaagtttaacccaacagaaagaccgagccagttatataattcacccatttccgttgcatcacgacttgaaaggtattcgttgacggtaacaacgtgaacgcctttaccagccaatgcatttaaataaacaggcatggtagccgttaaggttttcccttcaccagttttcatttcagcgatgttaccttcgtgtagcgtaatcccaccaataatttgtacacggaacgggaataaccctaaaacacgtttagcaccttcacgcgcaaccgcaaaagcttctggtaaaatatcgtctaatgtttcaccatttgctaatcttgttttgaattctggggtcttagcttgcaacgcttcatcagataaattactatattcatcttcatagctttgaacttgatcggcaattttgcccattcgcgctacttcacgtttatcgctttctacccatgtttttagaaagtttgccatgtgcgtcaattctcctctagaaatacgtttgagttcttaaatagcgatttcttatatagtcaatatgattactaacaattcattttaccatttattacaatcaaataaaaccctgtcacagtaaacaatccagccaattcagtaaaaatttaaccccattatctatatggctacaaaaaaagggctgagcgcaactcatcgttgtcccagccctaacttaacgttcacttattcatcagtttcaatcaaaccgtaacgaccatcttgacgtttataaacaatgcttgtaccgtttgtttctgaatcttcgaagatgaagaactcatggcctagcatattcatttgtaagattgcttcttcactatccattggtttcaatgaaacgcgttttgttcgaacgacttgcattgattcttctggtaatgcttctgcttctggcaccgttaattccatacctttaatcccgcgttcacgtgatttacggttaatctttgttttaaattttcgaatttgtctttctaatttatcagtaactaggtcgacgctaccatacatatcaggcgatgtttcttctgctcttaatacaaggtatggtaatggaatggtgacttccaccttagcggttttatcggagtacacttttaaattaacgtgtgcagttgcggtcgctgaatcatcgaaatatttttcgagtttgctgattttcttttcaacataactccgaattgcgtcagttacctcaatattttcaccacgaacattaaaacttagcatatgaattctcccctttcacaaataccccctgtgggcacttgtcgctcggaactcaattctttcccgaggctttgttactgacttcattatatataatttgcgcgtaacacacaaataatatggtcctagtggactaaagtaattgcgtgaattggcagcgtttggtatcgcttgcggagacactgctgagcatgccataacgtgcgcccagtggtataaatatcatccaacaaaattaactgctgcaccttggaactcaacagcacgttctgcgcgcatttaaaaaattgcggcgttgctaagcgctctgcacgatttttttgtgcttgtcctttttcagttggtagcttctgcaacaatggggtcagtggaaaacagtcctcgtataagccaaccaccggattgaatccgcggctttgcaaatgtgttggatcagtcgggactgggatatacgccgtttgccgttgcacaggaaaattttctcgaatcagccgttgaaatacgtgacgtaatcgataatccccctgccccttatagcgttgaaaatactgttgcattggttcgttgtatgttaacaacgctcgattagtaaattgttcgcctggatacagttgctgccatctctggcaatccggacacaccccctgggttgtcatttgccgaccacatcccgaacaacactgcggcccaatccgttcaaactgtgccatgcaacgtgaacagatcatcaccggatagactggtcgcaatgaacaaatcaatgcaatggagggttgttcaaggataactgccgcacacattaaacagtagattgtaatcgccgtccttttcgattttgtcgtttaatttgttgacacgcacgctgaatagcgaccgtgtaatccgcgtagaaaaaataaaccggattggcagcatgctcttgctgtcgtccggctcggccagcaatctgtacaagcactgattcagtgaagaccacgtgttctgcaccaagaacaaacactgcaatatttttaaacgttacgcctcgttctagaactgtcgtcgtaatcagcacgtccccgcatcctgctctaaaggccgctatcttgtctaattgattaggatcgccagcatgtaccgtgttcactgtaatgtgtggcaatgcccgaacaacgctctgctgaaccgcctctaaatcccttacctgtggcacaaataataataagcgttgttcttgaagacacttcctgagtaagttgcgcatcacggatggtaactgatgccgtttaactgaacgccgccacgtaaacaagggatagcaatgcggttcaggtaataagtgaccatgaaagcgaattggtagctcactacccgttaaatcccctgtattaatcgcatggcgcaactttacagttggtgtcgccgtcagatagatcaatgcacagcatggcttacacgcctgtttaacagccatctcaagctggggattattgacaaatgggaacgcatcaacctcatcgacaatgacagtgtcaaatgcctgataaaacttaaataactgatgggttgtacaaacaactaacggcgtataccggtaaggcgcagtctgttccccatgcatcagcatgattggtgtgttagcaaacgctgcttgcaagcgcggatagagttctaaacaaaccgccacccgcggcgcagcaacacacacacgctgcccattagctaaagccgtcgcaatgccttgaaataacatctcagttttaccagcaccggtcactgcagttaagacatggcgttgttgcttggtaatgaccgcaacaatctgctttgcggcttgtgcttgaaaaggggttagtgtccccgaccaagttagcggttctacgatcgactcaaacagattgcattcaggcacgtaaatcaactgatccccttccactaaccgcccaaaggtcaagcaagcagcacaataataccgaccatcaggtaagcgagcttgctctttcaccacttgtccacaccgttgacataccagacgctgattaactatttgaaacgctagtcgctgtttaatctgtggtaaactataattattcataacggtactcaattgggtggcactccactgacgaccataagcaagttgttttgccatcatttcaccttccacccttagttccgttaaatccagcttattttttcaaggagtccggtatgcaaagttattttaccgttcaaaaagacggcgaatttgaactcgaaatcaaaaagtcacgcttcatctgtcatgttgcgcgtgttacagacgaaaccgcagcacaagcgttcatcgcacaagttcgcaaagcaaatctgaaggccaatcataattgtttcgcctaccaattaggtttaacggccaatattcaaaaacaaagtgacgatggcgagccaagtggcacagccggcgtgccaatgttagaagtactgcgccagatgcagctcactaatctgtgtgtcgttgtcacccgctattttggtggcatcaaacttggtactggtggtcttattcgagcatacagtcacgccacttcggccggacttgaacacctcggtattgtccaaggtatcgaacaaaccgcttgtcagattacaattgactacgctcaatttgacactgtgcaaaatttacttagccaattaaacctcactgccgaagacatccaatatacgactaacattcaaatgaccgtctggttagcgactacagcagttagtgatttacaacaacaattaaccgaacgcctcaacggccaattacaattcgaccttggccctcaacaattcaacgaagtccccattagcgcacaggatttacaccagattcgctaccaataacgcaagaaaaggattagccaatggctaatccttttcttcattcttcggttttaataatcgttttaaaagcatcaataatgggcggcgattgtcaccaagtaacccaattgattcaacaaataattctaagccaattaagacggctaccgtcaatgccaagcttccccagagtgtcgatagtggatagagcaatgaaatcaacgagaagaccaatgccagtccataaatcacgagaaccgtttggcgatgtgataaaccaagttgcatcaaacgatggtgtaaatgatgtttatctgcttgtgaaatgggctttttattcaaaattcggcgcaacattgcgtaaattgtatccgtaattggtacaccgagaataataactggaatcaataacgtaatgaacgtcacgttttttaaacctttgagcgataagaccgcaatcataaaaccaatgaataaggccccggtatcccccaagaaaatcttcgctggatggaagttatgtggtaagaaaccgattaatgcagcgaccaaacaaaaaatcatgattgagacgctgacattggtgattgataagaagaaataggcgatgacgcccattgtgaagagtgcgataatcgaaacgccagttgctaagccatccaacccatcaatcagattaacggcgttggtaattgccagaatccaaaaaatggtgattgggaagcttaaccatcctagttcaaaggtgcctaaaaatggaattgtcaaaatattcatgcggacgcccgctaagaaataaatgaccaatgctgctaataaaataccgagcatcttttcctttggattcaattccttaatatcatcgatcatcccagtgatgatgatgatacattctgctaagaagatactgaaaagttcgtgtgtttggaattgcccgcgtaataatacgaaggtcccaaacgtaaacgcgataaaaatggccagaccacccattgccggcatcgcctttttattcactcggcgggcatttggtttatcaactgcgcctaaaacaaacgcgaggcggcgcactaatggggtaattgcggccgatacgagcatcgtcgcaaatagaccaactataattttaaacatgggttgcattcaacttgcctactttctcttgcattctctttattatacaaatcaaacccgttaaacacaacaatgacttgatttcttaagcaaaagccaagcaccctgattatctgtcccgcacaatctgggctaataaggccgtaaatcgtggatcagcattaaagggatgaatgtaatcaaattgttcgccttgattatccataaaatagtcccgattttcaacatcaatctcttcgatagtttccaaacaatccgcaacaaagcccggggttaggaccaaaatttttctaacgccttcttgggctaatgactgcatcgtagtgctagtggccggtgttagccattcattcggtccaaacttagattggtatgtggtccgaaaagtttgtttaggcaagcgcgcctgcaatagcgcagtagttgcttcacactgtgcttggtacggatccccttttgttacgtacgactttggaatcccatggtatgacaaaataatttcgtcataggtttgcgtctgtagcttctgttcaatcgccgttgccatcaagtcgatatagcctgagcgttgataaaagtccttcacaaaatgcaaagttggcatgtttgattgttttaaataaaactgcgcaactacatcataaaccgacatcgtcgtagtcgttgaatattgcggatacattggcacgaccgtcaaatcatcgattcccgccgtttgaatctcactaagcacatcggttaagaatggttgactatatgacatcgcctcaaaaacttgataatcgggtaattcagcttgtaattgagcaacttgctgttgcatgtacacttttaatggggagccaaaccgctttgggcatcgcaacgacccgctgatcagctaagaaatgttttaaaaaatggcgaatttctttgacttctggtttatctggggtccccaaattaactaataacacaccttctttcatgataatgtcctccacaattttaattaaaaccaaaaaaagagcggggaacaaaattggttttgtcccccgcttcaatgttaggccaatccgcattacttcgcgtattcgaccgttcttgtttcgcgaatcacagtcaccttaatgtggccaggatactcgagttggttctcaatttgattcttcacatcacgtgctaagacggttgcttggtcatctgtgacttgttctggtttaacaatcacccgaacttcacgacccgcttgaatcgcaaaactatgatcaacacctttaaaactattcgtaatactttcaagtttttcaagacggtgaatgtagttttcaagtgattcagaacgtgcacccggccgagccgctgaaatcgcgtcagcagctgcgactaagactgagataatcgatgttgcttcagtatcaccatggtgtgaaccaattgcgttaatcaccgttgccggttccttataacgcgttgctagttcaaccccaatttcaacgtgggagccatcgacttcatggtcgagggccttaccgatatcgtgtaacaagccagctcgtttagcgagtgtcacatcttcacccaattcagcggctaaaatccccgttaacttggccacttcaattgaatgattcaagacgttttgcccgtaacttgttctgaaatgtaatcgaccaagaatcttgattaaatcaggatgcattgtgtgcacaccaacatcaaagattgcttgttcaccgatttgtctgatttgttcgtccatttccttgcgtgacttatcaaccatttcttcaatccgagctggatgaatccggccatcttgaattaacttctctaatgtcatgcgcgcaatttcgcgacgaatcggatcaaacccactaagcacaactgcttctggcgtatcatcgataatcaggtcaatcccagtcagtgtttccaatgtccggatattccgaccttcacgaccaataatccggcccttcatatcatcatttggtaacgtcacaacagttactgttgtttcagcaaccatatccgctgcactgcgttgaatagcttcagcaactaatgtacgcgcagtccgatcagcttgttctttagctgtttcttcactttctttgattaaaacagcccgttcatgttcaaggtcttgtttcgtttcatccaaaatgattttttgcgcttcatcatgcgataattcggcaatttcttgcaacttcgctttttgttgctcaactaaagtggcagcttctgcctgcttttcagttagctcttgtgcttgattcgttaaacgattttcacgttgctccaatgaacgttcttttttatccaacgttgcatctttgcgatccattgtttcttcccgttgaatcaaacggttttcttgcttttgtacctcactgcgtcgatctttcaattcattttcaatctcagaacgatagcggtgattttcatcccttgcttccaaaagaatttctttcttccgcgttgcggcttctttttcagctgctgcgattattcctgtggcagtcttatttgcaccatcaatttcacgttcgtgcgccttcttttgtagaacggaaccaactagtaaaccaacgattaacatgatgactgcgaggattaatggaaaagctaagttcattgtttcacctccgcatcatcaaaaattttgaattgcaactttcactgcaaatttttaaagatgttattatgtttagtttttcaacacatagttattttatagtttcataaaccgcctgtcaacttaaactatcggcattgcaaccgttttcgagttcagtcaatcaaatcgaccatcagaataattcggttaagcaatcaaaaaagctgaagcaaaataacttttgcctcagcttaatgattcttattcgtttgaatcgtcatccgtaaagacgtcgagttgtgtttcatcgctttcatctactgggacatccgaaataccatatgcttcccgaactttaagccggacttcatcttgaacttctggatgatcagccaagtaattcttcgcgttctcacgtccttgaccaatgcgttcatccccataggaataccatgacccactcttattaataatgtccttttcgaccgccatgtcgaccagttcacccgtttgtgagatcccttgaccatacataatgtcgacttcagccactttaaatggtggtgccaccttattcttaaccactttaatccgcgcacggttcccgatcatatcggtcccattcttgatggtttcagcacgccggacttcaagccgaacggttgaatagaatttcaatgcgcgaccaccaggtgtgacttcggggttcccgaacatcacgccgactttttcacggatttggttaatgaataacgcaatcgtctttgttttattgattgttcctgataatttccgtaaggcttgtgacatcaagcgggcttgtaacccaacatgcgcgtcacccatttcgccttcgatttcagcacgaggcactaaggctgcgactgaatcgacaactaaaatatcaacagccccacttgaaactaaggcatcggcgatttctaagccttgttccccagtatctggttgtgacaagagtaaatcgtcaatattaaccccgagggcagttgcatacttaggatccattgcattttcagcatcgatataagcagcagtcccaccttgcttttgcacttcggcaacagcatgtaaggcaacggttgttttacctgaactttcaggaccataaatttcaacgattcggccacgtggatacccacctacaccgagcgcttcatccaatgcaagggaaccagatgaaacagttgagacttgtgtatcaaccttttcacccattcgcatgattgagcccttaccaaaattcttttcaattttctttaatgcagcatctaaggctgcttgtctttcatctttagccaattaagtgccctcctcaaaagagtccttttcagtactctcttagtttaccgatttcacgaaataaaagcaagtaaaaatcgaacaaacgttctatatattttttaagctactctactatacccgaatcaccgcgtttttttcgtgctttttgggttaaaaaaactggcgtgggattccccgccagtttaagtttatttagaaaatgagtctttaaagacgcctctgttcttgatgaaataatcggtacccgaataaactgtaaagaacaagcaaacgtataacatgatctgtgccattggaatgccgatattgttaaagaagacgttgttgagtagcaatagaataatcgctaacatctgcgtcgtcgtcttaatcttacctggcatagctgcggccatcacttcgccaccttcgcttaataataaacgtaggccagtaacggctaattcacgccaaataataatcgcaaccacccatgctggcgcttgatctagcgccactaagaagataaatgctgtcatcactaataatttatcagccaatggatcagcaaacttaccgaagttggtcaccaaatgttgtgatcgggcaatcttgccgtctagtaagtccgtcaaagaggctacaatgaaaatcactgttgcaataatcgcactgactggaatacttgtcccagcgaccataatggctgtcgcaggcacatccaatactaaaatcaaagtaaaaatcggaatcaaaataatccgaaacatcgttaatttatttggtaaattcatgttgaagactccttaatgtcctttatttagccaatgttgctgtgaaattaatcgtccgcacaaacgttgcttcgttatttggactaaggttaatatcggtgccattaatcttcatcttcgttgcaggtgcattcccagtttgaatactaaattgcgtaacgccttcaggtaattcagcagtttgttcggcaccaactgcgacagaaccttgccaaatttgttggccattggccgttaagctgacccaagcagctgatttatcagctgagaacgtaatttggttggctttagctggcaagttcttaatttcaaaagcttgttgtgacccattaatgctggtcatcttcgccgttaattcttgcttcttagccttatcttcagcagctttcttgctagcttcttgtgccttactttcagaagcggctttcttactgctttcagcagacttgtcttcactactgttatccttcttaggatctggtttatccccagaaaccgtaaccgatgagcttgtttcgtttaacgtttcgcggtctttaccacggttgctgagcgcaatcccatagaccaccccaataatgatgaccacaattgccacaatcgtaatttgtgggacaaggttgcgccatttcgaccatttagaatctgttgtttcgcgcgtcaatcgggtttgattttcaacggatttttcaacatattcttctggtttcgtatctggtacagcatcttggtattctgccaacaatgcatcattatctaagcccactgtttgggcgtattgcttgataaatgcccgcacgtaaaaactgccaggcaaggcatcaaaattgccctcttcaatggcgattaaatatcgtttttggatttttgtgatttgttgtaaatcatcgagtgtgtagcccttttcaattcgtgcttcacgtaatttttgaccaatttcattcataatcaattccacccactattatcccagtatcattatccataattatagcatattggtacgtatgtgcattattaagatttctttattttaaccaaccaccattaacgtacaatgtctgtcccgtcatataatcggctgcaggtgccattaaactcaatacccaataggcaatctgtgctggggttgcaaaagcaccggccgggatctccgctacaacagcagcccgttctgctgttgtgaactgattgttcattttcgtatcaactgcgcctggtgcaaccacattaattgtgattccaagcgatgccacttcctgtgcataggcgttcacaaaggcggattgtgcgcctttaactgtactatatggcacttccattgcactgccccggccaccatagattgaaccaattaaaacgacgcgtcctaatggactttgcgctagtttcgcttgcagctgctgcatcaatagcattggtgctttaacgtgcacctgccataagtgatcgagtgccgttgcactgacctctggcaataagccatacgtcgtcgcacctgctgtataaatgaccgcatcgacttgaaaaagctggcctgtcaattttccaacagcgtcctcttgggttaaatcagcttgaagcgcaaaaaaatcctgttttgggtagtcttgcaacaattgcttttgcagcgtcgtaacccgcgtctgattttgatgatagtgtaaataaagcgaccaaccgtccgccgccatttcagtcgcaaccgtcatcccaatatcaccggatgcaccgataattaaggctgatttaggcatggtttgctccctccggtaagatgtggcagactgtcatcgtttcaattttgaaataatcggttgccatctgttgcaagtccgctaaagtcacttgttcgatcaaacctaagacatcaaatggactgatttcggtaaagaattcatcactatattggttcgcaatggcttctagcgaattgaacgcttgcaagtattcaccaattgcggctcttttaaccaacgccaagttatcctctgaaaagtcaggactttccgtggcatgttctaagatattaataatcgcatccgataattcttgggcattgtccgcatcgccaccaagggtcacaaaattaaatgaccgttgaatggcaaattcgtaaccaaaactatcatcaagtgtgccatcatcgtacaacttttgcacttgcgttgatgaatcaccaaatagcaattcaagtaacaagttcatcttcaactttgtttcaagtgctaactcacctgttccgtaatccgttaaacctttaatcccgaccatgctcttgctacgcgcaattggcatttcaagtgaccgatacggaatgatatcatgaccatcttcagcttcttcaggcaatgaacgtacaatttctgttggttgggcaaatgtttttgccgcttgattggcgttcaaccaatcaaccacttcatccggatcatcaatttgcccaacgataaagaggttcatattactaggctgatagaacgttgcatgtgcttgatagagcgcttctggtgtaatttgcgcaatactatccaccgtcccagcaatgtccgtccgcactggatgactcggatagagattgccaatcactgtatagaataagcgccaatccggttcatcattatacatctggatttcttggccaatgatgcccttttctttttcgaccgtctcagttgaaaaataaggttcctgcacaaaatcaagtagaatatccaaattttcttgcaagtgactggttgttgaaaataaataactcgttcgcgtaaaactcgtaaacgcatttgagcttgccccgtagcgaccaaacttttcaaacgcatcgtaatcttttttctcaaataatttatgttccagaaaatgcgcaatcccgtctggcactgtcacataatccgtttccccagctgggataaacgtcttatcgattgaaccataattcgtcgttaagattgcatatgtcttatgataaccgctcttagggtatattttaacggtcaagccattctctaattcagtttcatagagggtttcacctaagcggggattttgtctaagcttcatctgtatcgacccctttcaggaagtaaatggcttgcaattgcatctttgcggcttgttcttgaaccgcttgtttagaaaccgccaagatggcctgtgtaaatcgctctgcatcaatttcagtttcaggcacaaacaaacgattaaattgttgttgccccaaataggccgcactatcgagactcgatttaaattgattaatcaaggccaacttagtttgttcaaagaccgcctgttcaaagtcacccgcgataatccgttgacgttgggcttcgataatctctaagacgcgatctttttggcgactttcaatcccagtctgtaccgtaatgacaccccgaaaagcatcgattgcacttgaggcatagtaggctagactcgctttttcacgcacattggtaaaaagtaacgacagcggtgtgccaccgaataaggcgttcatcaccattgtggcataataatcagcttgatagaaataagctggcatttgataggccatgtttaacttgccttgttgcaccgtttgtacttctgttttagtttgcacttgtggatataatgattgttgataaaaaatcgttggcagttcaacattacgcggtgcaaatggcaattgtgccaaatccgcgaccgttttggcttcgtcgatattaccgacaaacgtcatttggacccgatcgtttgcaatcatcgattgataatacgcatatagttcatccggtgtgatggttgctaaatcagctgcatccccataattgggaatttgttgcgtcgcatctttaaaatagagtttgcgtaattcaaccgccgcgtatgattgcttatcatcggcaacactttcgatgtaacgcactaagttctctttttcacggttaaaaatgaccggattgaactggccatcaaccacatctggatgcaataataattgcccgataaacgcaatcgcttgctcttgcaagtcgattgtatcccgtagatattgggggctcacaattcgcattgagatgctaaaaatcgccaagtttccttgtcgataggcattcatattaaagccggcaccatacatggcttgtaattcattcgcaattgcgacttggtcacgataggcttggctactagcacctagaacgctcgctaataatgagcgtcgggtcatcccatcagctgtgacgggcgcaattaattgaacggttaatctaattgttttaaattggttagtttgtaaaatattcaggtagacgccatccgttattttctgattcacgttatattactcctcactgtttcaacagttaaaatggctcttttcaacttatcctttttcatagcacggattctatcataccaaaaaaagaaggtgaactcaaaaaaggccgcgacaaaagtattttttgtcgcggcctttttcatttaatagtttaaccgagttccatcaaccagcgcctttcagttaatcctgaatgtcaatcaatcgctgacgcgcttattcgccattttaggcgatatttgacttatgtcacacgctattgttctgttggttcttctggtacgttttgtaataacaccttgcgtggcttactaccttctgatggtccaatcacaccacggctttccatctcatcaaccaagcgtgcagcccggttatagccgactctaaaacggcgttggagcattgatacgctagcggtttgctgtttaacgaccaattcgactgcctcttggtaatattcatcttctggttcttcagttgattgcttttcctgctcagtggttggaatcatttcttcgtcgtattcagccgtttgttgtgctttaataaacgacacgatactttcgacatcctgactcgaaatgaaggcgccttgcacccgtaatggtttgctcatcccgattggcatgtaaagcatatcaccacggccaagcagtttttccgcgccactgccatctaagatggtccgtgaatcaatcccactggatacagcaaacgcgatccgcgatggaatattggccttaatcaacccagtaataacatcgacagatgggcgttgggtagcgacaatcatgtgaatccccgccgcccgagccatttgtgccaaacgaataatcgcactttcgacttcgttgctggcaaccatcatcaaatcagataattcgtccacgatgacaacgatataaggcagtggtgcacctttaatttcgccgtcttcgttgtggccttgaatatactgattatattcaatcatgttccgctgacctgtatcggcaaataattgataacgtcgttccatttcttttacaaccttgttcaaggcgttcgcagcctttttggcattcgtcacgacaggaatcaatagatggggcacgccattatagacgtttaattcgaccatcttcggatcgattaacatcaatttaacttcgtgtggtttggcactcattaaaatacttgtgataataccgttaattgcaacggacttcccactcccggttgaaccggcgattaataaatgcggcatcttggctaaatccgacatgatgaccttacccgaaatatctttacctaacggtacagcgagtggtttgcctggatgtgggggttcttgttcaatcatttctctaaaggaaacggtcgaaacggtcgtgttcggcacttcaatcccgacatacggtttacctggaattggtgcttcaatccgaatatccttcgccgctaatgcaagcgccaaatcatccgctaagttaacaattttagagactttcaccccaactgccggttgaatctcgtacttcgttacggctggtcccagactagcactcttaaccgtcacatcaacaccaaacgaatcaaatgtttgtttcaagacctgttgattcttctcgatggctttatattccgcactctgatcagacgccggaatttgcgttaataatgctggtgttggcaattcgtaatcatcatccgtctcgttcagtggtgcgagttctgccacatctgggacatgctcatcttcgtcaaccaccggttcgggtgcagttggttctgcttgcgttgcaattggttttggtagatccttgggaccgtttattttaaaaggttccaatttttgcttcggtgcattttctggaccgtccgttgcgaccacttgctctttagtctctgacgtctcttctgcttgttcagttgcattttgaacagctttttgcgtctgttcttttaaagcactgacttgcgctttacctttttcagagaccttttggaaccctgatttcgtgtagccgccagctttaaagagcccatgcacaaaccgttgtgtactctgaacaacgacgctgaatggaatatctaagaaaacaaaaacgccgataatcacaatcaagacggctatcagataagtccccatctgcgcgaacaagaagtggaaaacaccatacaacgcggcgccaattaagcccccgccaacttccgtcgtaacggccatcttctggaagtcttccaataaaagctgccatgtggcggccaagaaatggttattgaccgcttgatggtgcaagacgaatgctgacaaccaaattaaaatcccgagatacgcgattgcaaatccaagcgtcttttggtgccataaggggggctgcttgccataaatcaacaaatagacccccaaaagggcgaataaaatagcactaataatgaacgtatcgccaacaaacagacggaatacgttagcgcaaagcgcgccgataaagcccagctttaaacccgcaaataaactaattaaaataaaaataaacccgatgatgttaactgtgaaatcagtttgttgttttttctttttgcgtgctgctggttttctttttttacttttagtggccatgaaaatctccttcaaccttaaatcctactatccattatacacgaacatctgtactactaaacccttaaatgtcagtcccgtaccgtttttaatcacggtactaaaaaaggccacggcaaaattgccgcaacctttcgctgattagtcttcgttggcttgcgctgtaaattggagttgaacgccccgatttaaagcaaccgccgtcacttgatacgtcaatgtttcgatgtattcaatcaatggtcgtgaaagcttcatcatgtctttttgatcaatttcacttggttcaccaaagaaatctaagagttgaaccacttgtgaaatttgacctgacactgcaaagccactcttttctggtgcaacttggaaaggcgtcacaatttggtaaatattccccgcgctcaaatcagcttcttgtaaatatggatcttcttcgctgatggtgactaagctgacttggatattttgttgtggttctacatcaggtgaaacacggtcataatgaaaagcatcaacagtaattggatctttcttcgtttgcatcaaaaacactccctattttaatttatcattgtcgtacaaatgactcttttcgagtcctggaaaatcttgttggcgcaatgcctcaaagatcactaatgccgcacagttcgagaggtttaatgctcgaatatggtcggacattgggattcgtaaacactgatcttcattttcacgcatgaaagtttcaggtaatccggtcgtttccttaccaaacataaaataatgatcaacacttgtatccgacacatcttgatcagaataagcttgcttagcaaacttcgtaatcaagtataaatattgacgatcgggcacagttgctaaaaaggcatccaagttcttgtgataattaatcttaacttggtcccagtaatcaagaccagcccgttttaaatgtttatcatcggtttcaaagcctaatggttcgattaaatctaaaacagtatctgttcctgcacatgtccgcgcaatattaccggtattggcaggaatcagtggttcgtataatacaatatgattagtcacggtctaaacttccttaaaaaagattcagtagattaattatacaatagaattcacaaaagctctaccttgctttgcaaataaaaaaacgtagtccctcggttattcacggcgagaaactacgttagtgtcatttcatcactagcttttatcaaaataaattctgataaaagttagggaaaaaattccttaaaaacattatagcgcccttattttagagttgcaatcagatttttaaactttctttaaattctcatcattttcccactaaaatcgtgacatctaatgaaatttcaggtagcgcttctaacgtgattgccgctaattgtgccttagaagccgtccacgtcaatggcgtcatttcgaccaaatcgcgcaatgtctcgggtgttaacgtcattgttttttgaacttgcatttcttgataatctggaaaatgttgcgcaaacaattctaagaccggaccatgatcatagctttccttagcttgaccatgatacagtaactcccgtaactcatgtaagtaacccgcattgggaaccaccttaattagttgaccacccggtttcaagacacgtttaaattcttgatattgcgaaggcgaaaagatattgagcaccgtatctaactggtgatcagcaaatggcatccgcgctaagtctgctgcacaaaaccacgcatcggcattgtaatcacttgccaattgaatcgcaggtttagaaatatcaaacccgatataacgcgcggaaacttgcgcattgagctgttgcactggcgttccttcaccacaaccgacatcaaggactaaactatcgggggtaatccgtgatgcaatttcttttaagaacggctgaaagaaccctgcttgtaaaaaagcccggcgatgttgcaacatttccttggtatattcagacttcatttgctttgctaaaaaatataacgtgccatttttagcgaggtcaaaactatgcccattgacacaaagtaattggtgctcggctacacttgcaaatacgtcctgacagattggacattgtaatacggccaagttcgtcgttaaaaactgcttggctaactcaatttttttcaaatttctgattctccttgatttaacgtgctttcaaaagcatcctgttccggttagctacattagccaaacaatcggctacgccgcttattcgtctaattaggctaatcctcacaggataaccgcttttgacgcacttcttttcttaacgtactttcaaaccatccttttgcggttaactacgtccagcaaacgatcgacgctgtcgctcattcacgagactaggttaatcctcaaaggatacccggtttgaacgcacttcttttataccgcactttacattcttaaaatatccagtagacttaacagtaagttattgatgaaggaagtgacaccatgctcgaaacctatcgcttcgacagtgctaagaaaaagctcaccaaacatgctaaaatccagtccaacagttggattaacgtaactgatccctcgactgaagaaattgagcttctcactaagaagctccacatcccatctgattttatctactatagtttagatgctgatgaaagtgcgcgtgctgagcacgatcctgattataatgcgaccctgattattttcaacataccaattcttgaaaaagacccgcaaaaaccagataaatacctctataaaacaagtcccttaggaattattgtaacagattcgaccgtcttaaccatcaacaaaacgccagtcacctttttacagagctttgttgatggccaaattaaaggtttcaatccacaaaatcaccgtagaagtgtcctccagattctcttccgcatttcatccatctatctccaatatttgcgggacatcaaccgctctcgtgaacaaatcgaaactcgcttgcagagttccctacagaatgaagaactcttcgatctgatgaccattcaacgcggcttagtttatttcatgatgtccttaaagaccgataaaatggtactcgctagtttaatgcggaccaatatgttagatcttaatgaagatgaaattgaattgcttgatgatattcagattgaaaatcaacaagccatcgaaatggcagaaatttccaacacaattattaacgaaacagccgatacttactcgtcaattattaataataacatgaatagtgttatgaagttcttggcatcttattcaattattctcaccatccccggattagtatttagtttttacgggatgaacgtggaccttccactgtctcgctccaaaacaagttggttgattactttattcatttccctgatcatttctggtgtgctagtctatcgcttctggcgcaagcggtacattaaatagagcgtgtgccagctcctgcggattagaacccgtttaacttacaaaaggccactatcatcaaacacattctcccattctttgggttcgaatgtgttttttatttgactttcataaaaaagctcgttattatacgttatgcacggataaattccgtgttatccaaaataaatgttcgtttttaaggagaattcccaatggacgtatttgattacgaagatgttcaactgattcccaataaatgtattgtgaaaagtcggagcgagattgatactagcgtccgctttggctcagaaacgtttaaaatcccagtcgtccctgctaacatgcagacgattattgatgaaccgcttgccatctggcttgccgaaaaccattacttctacgtcatgcatcgatttcagcctgaaaagcgtcccgcattcatcaagatgatgcacgagcgcggcttatttgcctcaatcagtgtcggggttaaagacgatgaattcgactttattaatcaactcgcaaccgataacttactaccagaatacattacaatcgatatcgcccacggccactcacaagtcgtgatcgatatgattcaacatatcaaaaaagtactgcctaagagtttcgtcattgccggcaatgttggtacccctgaagccgttcgcgatttggaacgcgcaggtgcagacgcaaccaaagtcgggattggccctggtaaagtttgcatcaccaaaatcaagactggctttgggactggtggttggcaactggcggccctcagatggtgcgcgaaagctgctaccaaaccgatgattgccgatgggggaattcgaaccaacggtgacatcgctaaatcaatccgttttggcgctagcatggtgatgattgggtccctctttgcagggcacgctgaatcacctggcaaattagtcgaagaagatggtcaacaattcaaagaatatttcgggtcagcttcagaattccaaaaaggcacacaccaaaacgtcgagggtaaacgcattttagtgccttataaaggtgcgattagtgacacgctcaccgaaatgcgccaagacttacaatcatcgatttcttatgctggtggtaaacgcttatcatcattgaagaaagtcgattacgttcttgttcgccattcaatttttaatggtgacatgctttaaaaagcagttaaaagagccagactaccttttaaatcggtagtttggctctttttagttaggtacctaaaaacttctctgaaatggttgaatccgacttgaaacaactgtataattacccgtgtcgcttttaaccttagcgtctacattgatcagaaaagggtgtgaaacaaatggatattaaacatacacttggagataacagtgttatctttcgtgatgcaacatacattagaagaacggtgtttgtccgagaacaaaatatgccggaaacacaggaaatcgatgcgcacgaagatcacacgattcactatgtaggttacctcaatcaagacccagcagtaaccgcacgcgtgcacgtcttaaaagacggtggatttagaattcagcgcgttgctaccatcaaagctttccgtggccaaggactcggctatcaattaatcgaagccatcattgaagacgctaaacgcaccacaacgccttatattattttattcgcacaggaccacgccattggtttctacgaaaaattaggctttattgtcacaagcgaaggcgaaatggaagcgggcatcccccaccactacatgaaattaacgctctaaaaaccaaaaaacgcacgatccgcatttattacggatcgtgcgttttttattgctcgtataagcctgaaactgacttgaaccattcaaaaaggtgactaattaatatcttgataatcgcatatactggaataccgagaatcacaccggcaaggccgaataactttcctgaagccagcaacacaatgattgtcgtgaccggatacattgccatcttgctccccaagaccaatggggaaactaaacgaccttccaaggtctgttcaacagcaaacacgatgagtactttaatcaataataacggcgagataaacgctgcaataatcactgacggaaccatcgctaggaaagagcctaaatacggaattaagtttaaaatccccgctaaaattcccaacgtcaacccgtacttcatcccaacaatccagtagcctacagtaaacatgactgcaacccaaaacgctactgtcaattggccgcggatgtactgactgacctgtgtgttaatttcttccaacactttcccagttgtggcgcgtactttaaccgggaagaattttaacaaatagcctttcattcggtgaccatcttttaacatgaagaataaaatgaacggcatcgttacaatcgcgatgactacgttcgtcaccactccgaccgctgttccaatatgactaacggtcgaagtcagcattttatttactttacttgataaattactaaacacatccgtattgatatcgtttaattgtttttgaatcgatttgaaggctgggtcgttaaaccatttcatcgtctgagtttgaatattcgcccaataagacggccactgatcaattaaactcgttgtctgggattgaatgattggaataatcgtcgcaattccccagaccagtaagccaacaattaaaataaaaataatcgtaatcgacaatacccgatttaaatgccaacgccgttcaaaccaatcaattaacgggttggtcaagtaatacaagacggccgcaataataatcggtaacccaataatcaacatcaacgactgaattggttttaacagccaagcaagttttgttaataaaagtataatcagcaacgttaataacatgtttaacaaaacaatcggtagcttcttatttaaaaaccatttaaagaaccatgaacgttctgtttgtggctgtttattctctgtcacaccaattcacctaattcctacatagtttcttgatacgttatctgcgttcctactttgaattcaggaacagccggaacacccgcggcggctggtgttaaataaagcccactttgcagttgatcttcttgtggcgcaggtccaaaaactaaagcgacatgaccaatactgttgaggttaggatttaccaacgcgcccacatacgtaatcgtataaggttgttgattaataataaccgtagaatctgtcgtcagtgttagctgttttttggccgcttcgtccataaaatgttgaatcaatgccacgttttgaatggcagttgtcgcatgttcatcgaataaaatgaccatcggttcttgatcatcaatggcgtcgttgccaattgaaatgacttctgcttgcgtgttcataatgaaatctcctcttagttaagatagtatcattgtagcatattcgcgacttagttttagcgactagtgaatccttttagtaacaaattaaaccgttttcgcaggaatatgctatactcaaagagtatttgacgaagggagtctgattatgacagaagaagttttaattggtggttatacccgccggattggtaaagggatctaccgcggaattttcgatgcaacaactgcaaccgtaagtgacatccaaccattcattaatctcgataacgcatcctatttaacgatttcaaaccgcaacatcctctacaccgtcattaaagatggggaccaaggtgggattgctgcctatgacttagctagtggcacccctgtctttttgaacgcggtcttagcagccggcgcaccaccagcatacgtggcagtcgatgaagaccgccaactcgtttatgcagccaattaccataaaggcgaaatactcgtttatcaaatccaagccgatggcagtttaaccttagcgagcacgacagttcatgaaggccatggtccgcgtcctgaacaagctagcgcccacgtgcattataccgacctaacacctgaccaccgcttagtggtctgtgatttgggcaccgatgaattagtaacttatgccgtcgacaatgctggtcaattaaccaaagtggcaacttacaagagtgaacctggttttggcacacggcatttagtcttccatcccaatcacaagacagcttacctattgggtgaattgtccagtgaagtgacggtcttagattatcatgcagccgatgggacttttagcgcggttgctacctactcaatgttacctgcagattggcacgaagcaaacggcggcgctgcaatccgtgtttccaaagacggtcgtttcctttatgcttccaaccgtgggtataattcaatcgttgtgtatgccatcagtgatgacagtcgccaactacgagcaatccaacaaatgtcaacggatggtgaattcccccgtgacttcaatctttccgctaacgacgattttctattagccgttaaccaaaatagtgataatggtacgctttatcggcgcgatgcccaaactggtttattaaccgcctgtcaaaaagacttagaaacacctgaaggcgtctgtgtcttattccattaaaataaaaaagattgaccgtattggtcaatcttttttatttacttcttttacgatccattaaattaataataattgcaatggcaattaacacaattgacgcaaaataaatgaagtgtaaaccattgtatagaatatggcgtaatgttggtaataattgtttaggtaagttcaaagcagtttctggattaatcaattcatttaacatgttttgatctaatcgaccatcaccagcaatcccttttgccaattgccgattcaaaataatcccataaactgaaaccatcaaggtttgacctaaagttcgacttaaagtattaaacgacgttgcaacaccaactttgtcagcaccagcaacgctttgtgccgtaacagtcgtcgtggtaatgattaagccaaagccaatccctaaaccagcagcaactaataagaagaaccaaaacggtgtggtttgtgggaccaatgctaagatgaagctcccaacaagtaaaatacacaaactaccggctagaattgttcgtggtgcgtgcttaacaagtaataggcctgcccataatgaggcaaaaatccacatcacagaactaggcgtcacaacaaagccccccatcgaggctttcaatccgaggatcccttgcatccacattggcatatagacttcaaaaccaattaagaaaccactcactaaagcagccactgcattttggacaacaaatgttcgatttttaaataatgataatgagataatcggatcttgtgcatgtttttcaacgcggataaagaggtaaaaagcaaccactgcaatcacgagcattgaccctaaaacgagcactgacggtttggcttcacccatgacttggaagccatatagtaaactcaaaagggccgccatcaaccataaactgccccaatagtcgactggttcagcactcgtcttcttctcttcttgaaggaagtaccagattaaaccaatcgtaataatcccaatcggtacattgatgaagaaaatccaatgccaggtcaacttatcaacaatgaagccccctaaaagcggcgcaatgatggaggcaatcccccatgctgacccattaaaacccaagactttcgcccgtttttcaatcggataaatatcagcaataatcgtaaatgataccggcataatcgccccggctcccaagccttgaattgcccgggaaataattaacgtccccatatgatttgacaatccacataaggatgatccgatgacaaacaaggccaaaccaaagatgaagattggtttacgcccaatccgatctgccatcttaccatagattggcgtcatcatcgcattcgttaataggtagattgaaaagacccagttcatcaatttcataccgtgtaaattactaatgatggttggcattgccgttgaaacaatcgtcccttcaatggctgtcatgaaagttgcgacgaaaatcgcaatcgtcacgagtaatacattcgtttttcttcccttactttgttccattcttagctccctctcttattcttgggcataaaaagagccttttcttaactcaaataagctaaggaaaggccgcctcttttactcgtctaataatacattaggcatttagtttagcaatacttgcctttaaggcatccactttatctaaacgttcccatggaaattcgacatctgtacgcccaaagtgcccatatgcagctgtttgcttgtatataggtctttgtagatctaacatttgaataatccctgctggtcgtaaatcaaagttttcacgaattgcagtttgaatcttttcttcactgacggtccctgtttcgaaagtatttattgaaacagaaacgggttgcgctacaccaattgcataggccaattgcacttcacacttgcgcgctaacccagccgctacaatgtttttagcaatgtaacgggctgcataacttgctgaacggtcaaccttagtagcatctttccctgagaaagcaccaccaccatgacgtgcataaccgccgtaagtatcaacaatgatcttacgaccagttaaacctgaatcgccttgtggtccaccgatgacaaaccgaccagttggattaatgaaatacttggtttgatcatccaagtatttggctggaataacggtttgaatcgcttgttcaagcatatccttttgaatggtttctaaagtcacatctgcatcgtgttgggtactgataacgacggtatcgacacgaacaggttgttcgttttcgtcgtattcaacagtgacttgcgccttagcatctggtcttagataagcgagttgcccgctctttcttaactcagcgactttgcgcattaaacggtgtgaaagggcaattggtaacggcattagttctggtgtctgatcgacagcaaacccaaacattaacccttgatcccccgcaccaatcttatcaagtggatcttcatcctttgcacgagattcaactgaatcgtcgaccccttgtgcaatatcaggtgattgttcatcaagtgcaacaatcacagcacagttatcgccatcaaagccataatgcccatcacgataaccaatccctttaatagtctctctgaccactttttggatatcaacgtatgccgttgttgaaatttcgccgacaactaggactaacccagttgtaacggttgtttcacaagcaactcgtgcttgtggatcttgtgctaacatcgcatctaagatggcatcactaatttgatccgcaatcttatctggatggccttcagaaacggattccgaagtaaataaatgtctttcttgcatttctatgtttccccctatatatgtgtcggttacaaggcctcttcacggtgtgtgaatcctatcgggaacttcttataactctactatcctagcacaaaatacaatccatttcaaaagccgttgaccttcttttcaaaaaaagttaagatgagacacatattctaagaaagaagtgttgctattgttctaccttaaccaacaacatctaaaggcttcaactcggccacaattactgactttgtttaattatttaaatctcggtttaatcgtcggactgacaatgtggtcttttccaaagcaattcgggctttcattttatctaactgcgattctaggggcgctattagccattttactcgtcttatcaccccggtataaaccaaagcgaataattgcaactgctgcccttttagtcgcaattattctagccgcaatcatcggctggcgtgatctacctttgattgggcttctatcagggattactagcatttttgttctaatcccttttatctacccagaccagttcaaagaccgtacgttacggttatcatttcaattcttactagccccatttttctttttaattactcagattttcagtggcattcactttatccccgaggatttactcgtaaaattaggcctattcttaatcatcatttatcttctcgaactaacgactcacaatcggatgattactatcctcagttatgtagtatgggcgtgcattattattgcagtgattttaacgcatttaattcacggttggcatttaattctctttgcaggtggccagttattattaattgcgttacaactcggcctaatcaaacgtaactgctatttacaagagtttggatacttgctattaatcactggcgtctttaattaaaatgattaaacaacaaaaaagcgtaagcaataaattgcttacgctttttttaagacggtcacaacgggactcgaacccgtgatctcctgcgtgacaggcaggcgtcctaaccagctagaccatgcgaccgaatggaggttacagggctcgaacctgtgaccctctgcttgtaaggcagacgctctcccaactgagctaaacctccaaaaaaatgacccgtacgggatttgaacccatgataccgccgtgaaagggcggtgtcttaaccacttgaccaacgggccatgtcatttattatttaacggagagtgagggattcgaaccctcgaaacaggttagacccatttacatgatttccaatcatgctccttcggccgctcggacaactctccaaataattgactccggttgtcaggctcgaactgacgacatcatgattaacagtcatgcgctctaccaactgagctaaaccggaatgaaaaactggatacaaaaatgttaataaaaaatgcggaagtagttcagtggtagaacatcaccttgccatggtgggggtcgcgggttcgaatcccgtcttccgctttttttgtacccgtaataaaatagtttccgggaagtagctcagcttggtagagcactacgttcgggacgtaggggtcgcaagttcaaatcttgttttcccgactctcaaagacttgttgatgacaagtctttttttgtgcgtccaattgattagctactaaaagtcagtaaactttcattttgtactgataatcgttataataatagtcaacgttagtcaaagttaaacttttgacactgaaaaacgcagaagactaaatgaaggggctgatatgtttgcaaagtcagaacatctcggatattattgaagcctatctaaaaaagatactggctgacaatgaacaaatcgaaattagacgctccgaaattgctaagctttttaattgtgtgccgtcccaaattaactatgtgattaacacgcggttcactgagcagcgcggttatgtcgtgaatagtaaacgtggcggcggtggttatattcggatcgtcaaggttcaatttctcgatgatcgggactttttagaagcgttaattgaaaatgttgatacgcagatttcccaggcggacaccttagccattatccagaaactatatgatgaacaaattctttcgcaaaaggaaggcaatttgatactcgcggcaacgagtccacagacattagcggttaataataaacaattagaagagcagcttcgagcacagattctagttgcagtgttagaacgactacgatatgaaattaagtaaagagtgggggattatccatgaataatctatttacaccaagtgcaaaaaacgtcttaatgatggcacaagaacaagcaaagaaatttaatcaccatgcactaggaacggaacatctcctattagcaatcgtattagaaaatgagggaattgctgggactactttacgcgaattaggtgtcaattcgaccgatgtccttgaagaaattgaacgcttaaccggatatggcgatgctgtaatcgcttctggcattggcggttatttaccatattcgcccaaagccaaacaagtactcgatattgctcgggtcgaagcgcaacaagctaattcggttaaaattggcacagcacacctattattagcacttttacgtgatgatgatattatcgctgcgcggatcttattgaacttaggacttagtttagctaaaacacgccaactactacttcaaaagatgggtgtggatacagcaaccgctaaaaaacgggctaaagcagctaagaataatgccgatcaagctgggacaccaacgttgaaccaattagcgcgcgatttaacacaacttgctcgtgacaatcaaattgatccggtcgtgggtcgtgatgaagaagttcggcgacttgtgcagattttagcccggcgttcgaagaataaccccgtcttagttggtgaacctggtgtcggtaagacagcgattgctgaaggttttgcgcaacgcatcgtcaatggcgatgtgccaagtgacatgcagcaaaagcggctcatgatgctcgacatggggtcattggttgctgggacaaagtatcgtggtgaattcgaagatcgtttgaagaagattatcgatgaaatctatgcagatgggcaagtgattctctttattgatgaattacacaccctcattggtgcaggtggcgctgaaggggcaattgatgcttctaatctcttgaaaccagcattagcgcgtggtgaattacaattaattggtgcgacgactttagatgaatatcaaaagtacattgaaaaagatgcagctttagagcggcgattcgcgaccgtcacggtcaatgaaccaacgccagaagatgcggaacaaatcttaaagggattacgtccacgttatgaagctcatcatgggattgcaatttcagatgaagctttacatgaagcggttgtcttatcaaatcgctacatcacgaaccgattcttaccggataaggcaatcgatttaatggatgaagcgacggctaaagtgcgcttggatgctgttaaccagaagacaccgtcggataaattagaacaaaaactacaaactttaaatgacgataaagaagccgctgttcgcgcgcaagattttgaaaaagcggcgacgattcatgagcaagaagtaaccactaaggccaagattgccaagttacaagctgccgaacaagaaaacggtgttcgcagtgacattcaagtgactgctgaagacatcgctcaagtggttgcgcaatggaccggtgtgcctgttactcagttgcaacgcaaagaaagcgaacgtctcatgcaacttgaaaaagtcttgcataaacgggttgttggccaagaagaagccatttctgccgtttcacgtgcgattcgtcgtgcgcgcagtggtttgaaagatccaaaacgaccaattggttcatttatgttcttaggcccaaccggggttggtaaaacagagttagccaaagcattggcggaagccatgtttggttctgaagacaacttgattcgggttgatatgtctgaatatatggaacgttacagcacgagccgtttagttggggcggcccctggctatgtcggctacgaagaaggcggccaattaacagaaaaggtccgcaataaaccatattccgtcattttatttgatgaagttgaaaaggctcaccctgatatcttcaatatcttgttgcaagtcttggatgacggctatttaaccgattcaaaaggacgtaaggttgatttccgtaatacgatcatgattatgacatcaaacttaggtgcgacagccttacgtgatgataaatccgttgggttcggggttaaagatgtaactgctgattataaagcaatgcaagggcgcattatggaagaattgaagaaagctttccgtccagaattcttaaaccgaattgacgaaacggttgtcttccattccttaacacaacctgaattgcgcgaaatcgtgaagattatggcgaagaatgtcttgggccgtttagcggaacaagggattcaaatcaagatgacagctgcagcgatggatgttgttgccaaagctgggttcgatcctgaatatggggcacgaccaattcgacgggcgctacaaacccaagtagaagatcagttgagtgaagcgttgcttgctggcgagattacgatgggtgtaccggtgacaattggcgcaactaaaggtaaaattaccattaccagtaagactgataaagtaactgtttaaacgtaaataaggtgtcagaccaattggtctgacaccttatttttttgccctaaaagggtcgtgagctgttcaatttcagttttaatcgcagcgccgatattcgtttgactgacacgttgacgttgactaacttgatcaatcactcgacgcgtggaaataatgtcttgcatcttggcaattgcattggctcgtgtggtgaacggctgatgggtgactaactgcattccatacgaattgtacaagagcgtaaagccaccaatgccagttgtgtggtgataagcttttgaaaagccgccatcaatcacgatcattttgcgattagccatgattggattgtggccttttttgacaggtgtgtgaccattgagaatgtgccccgtttctggcgttaagccaaactccaacaagagtttctcaatgaagtcttcctgatggcggagttggtaatatgcgttcttcttttcttcgtgtaaaacggggtctgcgctgaagtagcgttcgaaggtcgtcatcgcattcttgccaaatagtggggagagcggtcctgtccacaggtaccagagtaaatcggtggataaattatcttgattgagcgggtggtcgaagctcgttcgaatttgatgatcgaagaagtcgagtaatgatttaccagcgtattgtcggttagcgagggttagcgtgaggaagttgccggcttcatcaactggaatacagccgtgaaaaaggaggttctggttgtagagttggtacatgttaccgttgtcgattaaaaaacggagatgcttgcgtagtttttggcagtgggtaaacgtgtttagcaatgatgtaacaatggctgcttcatcggaagttaatatttctgggtgggtggggtcgactgtttgaaagcaggtgttatcaagtggatagttatgaccatttagatgaattgtctgctgttcaaagtcaacatggctgagggttaagcggtggtccattttgaaatcaggattgcgtttaatcacggtttgttccaacttaaactgcatgatggcgatggcttggtgcacttggttgatgcttttcttttcagctgttgagattgcgggttgattggcagcaacctttggttcgaaggcgggattgggctgataagttcgttgggcaaactgaaccagttcgctaaggtcaattccgtaagctttctcgatgatggctaaattattgtagcgtgcgcaaatgcgtaaaaggttgagcatacatagttgagaaccgctagcggcgccgaaccagagaatatcatgattgccccactgaatatcaaccgcggggagcttggtgagttgttcgacaatcagatcgggacgcggcccacgatcgtaaatgtcaccgatgatatgccaatgatcaaccactagtcgttgaatcgtatgactggtggcgataattaaggcatcggcttggcccatcgaaatgatggacgtcgtgatttcttggaagtagcgtttcttatcgctgttagctacatcgccgtacattaattcttcggtaatgtagacgaaatcgggcgccattgctttacggacttttgagcgtgtgtattttgtggagacaaattttaagaggtcgattaaccgtttaaaagtggtgaggtaccactgatcgagttcgctagcagatagttgtgcgtgtttgagtgcaagccgctcggttgggtagtaaactaaaaaagcgaacgcctgcattgtgtcttcagtcatttcaccggaaaagacctctgcaattttttgccggagattccctgcgccagtgcgaatgagatgctggaaggcatcatattcgccatgtaaatcactcatgaaggcttcagtgggtttggggaggttcaagatggcctttaagttgatgatttcggaagtaattgccattttagtggggtatttttcggataacgttttcattttattgttaatcattcgccaaactcctttgataaactaatagttcgattataccaatcataaatataaatgcaaattactttgtttaaaagctttttattagtatataccaattaaaaagtcgcgcagtttagcgcgacttctggaaactattgatcttggatggtgccatcaacgtggcgctcaactttcatttgcgtcattgggatgtagcccagtttagggacgattgtcttttgaatgtcttttgattggatgaagtggatgaaacgggctgtttgatagttaggtgcgcccttagtatacatatgttcgtaagaccagattggccatgcattggttgaaacgttcttttcggtaggctcaacgtcgtttaacttaacggcttgcaagttacctttgatgtatgggaaggcgaggtaactgatagcgcctggcgtttgttcgacgattttttgaacagtcccagaggaatcttgttcttggctggtaacaactttgtcggttttaagacctaatttttcaaacgtttgacgtgtcccacttccttgggcccggttgataacggtgattttttcgttaggaccaccaacggattgccagtttgtgatttcgcctttaaagatgcctagcaattgtgcactggttaaatttttgatgcctaactttttattaacaacgggtgcgattgcaaccacagcaactttgtgatcaacaagtttcttagcatcgataccatctttttcttcagcgaagatgtccgagttaccgattgtgacgttgccaccactaatttgggttaaaccagttcctgaaccgccaccttgaacggtgacgttgactttagggttatccttttgatattgatcgccagcttgctcaacaaggggttgaagggctgtcgaaccaactgcagtaattttagcgccttgatcctggctttgacttgcactttttgattggccttgacaaccagctaataaaagagcgaccgcgcaaactgtgagtaatgccatactaatgcgtttcataatgattcctcctgaggactgatttaagggtacaagttcagtatagagacgtcgtgtaaagattgatcgctaattcgtgtaaaaaacgtaaataataagtcgcgagtttgtaaatgattccgtgaggggcttgaagattgtcattagagacttttgttaaaagggtgggtaggcgatacagccataaaatgctatgattaaatgagatagttagaaatggagcaaatacataatgttatttattgcgatgatctacttgtttgtctgtttaccttttttatgtgctattgtccaacgcaatgatcgccaatttattcaattagttggtatgttgatcaatttggtgcttgtattaggattaacgattttagtgacttttgggttgactggtcatgttattcattttagtgatggtttgttccaaaagttatttttactcaagtttattatgttgattaccattattcaaggcgtcgtgttggtgacaagaaggtggcgccaaaaatggttaacatttgaactggtaccagtcacacgcacaagacattggtttagctggtggatttttagtggtgccttattaatatcagttgggtatttcttgttgtcagctagtttttggacaaaggcaaattttggcttgttaacgcccgagcagatagtttataacttacgccaaccgatgacaggtgttgacgatggttttattaattcatttatcggcggtccggtgctaggtgccattacttgtttaatcagcgtttttttgttctgcaactatatcagacacttgcaactgttggtcactcataaaataacacaccacttagaactcaaggcaaaacgatttgtattggtcagtgcgttattgttttgtggtttgacgacggttgctgcgattaaaattgatgctgttggtttttacgaatatctaacggcgaattcaccatttattgaagaaaattatgtagcaccgaataaaaccaaattaacgttcccaaaacaaaaacgaaatctaatttatatttatgctgagtcactcgaatctacagcaacatcaagagaaatgggtgggcagatgaaaaccaatttactaccagaattgacggcgttagctgagcaagagggtgttcacttctcaaattctaaccgatcatttggtggtgcccaacaattaccaggaacaggctggacagttgcgggaatggtcgcccaaacatcaggattaccgttgaaagtgccggtggatgggaattcctatgcgacagataaaaagaatcatttcctaccaggcgtcacgtcattaaataatattttggacaagcacggctatcagcaaaaaatcttgcttggatcggatgcgacttttggtggtcgacgatcatattttacgcagcacggtaatgttcaaattgatgatttgttaactgcgcgtaaagatggtcggttacctgaagactattatgtttggtggggctatgaagattcaaagttattcgaatacgctaaggaaagtgcgttggagcttagcaaatcagatcagccatttaacttaacgatgctaacggagaatacgcaccacattggtgggtatccagaaccgaatatgccagaaaagtatggtgaccagtattcaaacgttatcgccttttctgatcatcaaattgttgaatttattaagtgggcacaaacgcagtcgttttatcagaatacgaccatcattgtcaacggagaccatttaggcatggatgtggagtattataagaagattccggccaataaacggcatgcatttaatttgattttaaatgcaccaaaagcaagtcaggttcaaaccaagaatcgccagtttagcacaatggacatgttcccaacgacgctcgccgcaatgggggttgatattaaaggagaacgtttaggcttaggaactaatctattttcaacgaaaaagacattaatagaagaaaagggattgaaaaaggttgataaggccttgagcgccaaatctaaattttataataatcaatttatctatgataagtagcaccgaggcagattattgacttttagtagtaaaagaagtatattatacagtaactgcgaaaatccgtagaaaaatttattgtgctgatctattgtccagcacggtattcatgaaaaacaaaaatagttagtctgatttattcagcttaaaataactgtttttgttttttttctgctcaaaattaccaaaaaatggcgatgtaatattttcttaacatttgtcatatttttgtaacaatgaggctgcggaaaacttatagaggggtgaacaatttggcaggacacttagtgaattacggtaaacatcgtactcgtagaagctacgcacggattaaagaagtgctagaactaccaaacttgatcgagatccaatctaattcctatcaatggtttttagacgaagggcttcgtgaaatgtttgatgacattatgccaattgacgattttgctggtaacttatcattagaattcgttgattaccaacttcttgaacctaaatacacggttgaagaagctagacaacatgatgccaactactcagcaccattacacgttactttgaaattaacaaaccatgaaactggtgaaattaaatctcaagacgttttctttggggacttcccattgatgactgaccaagggactttcatcatcaacggtgctgaacgggtaattgtttctcaattagttcgttcaccaggcgtttatttcaacagcgctgttgataaaaacagccgcacaacttatggtacaactgtcattccgaaccggggtgcatggttagaatttgaaacagatgctaaggatattgcatacgttcggatcgatcggacacgtaagattccgatgtctgttttagttcgtgctttaggttacggttctgatcaagaaattatcgatatcttaggcgacaacgattcattaatgttgacgttagaaaaagatattcataagaatactgacgactcaagaacagaagaagctttgaaggatgtctacgaaagacttcgcccaggcgaaccgaagacagctgatagctcacgttcattactttatgcacgtttcttcgatgctaaacgttatgatttagctgctgttggtcgttacaagatcaacaagaaattaagcttaaagacgcgtttattgggtcaaacattagctgaaacacttgctgatcccgatactggtgaagtgattgctgctaaagatacagttgttgatcgtcaagtgatggatgctttggcaccatacttagacaaagaagacttcaagacggttacttaccaaccatctgatgaaggtgtcttaccagaaccaatgacactccaagtgatcaaagtgtactcacaaaaaacacctgataaagaaatcaacttaatcggtaatggtcatatcgatgccaagattaagcatgttattcctgctgatatcatcgcttcaatgaactacttctttaacttacaagaaggtctcggttcaacggatgatattgatcatttagggaatcgtcggattcgttcagttggtgaattgttacaaaaccaattccgaattggtttatcacggatggaacgtgtggttcgtgaacggatgtcaatccaagacacaagcaccgtgacaccacaacaattgatcaatattcgcccagttgttgcctcaattaaggaattctttggttcatcacaattgtcacaattcatggatcaaaccaatccccttggcgaattgacgcataaacgtcgtctatctgccttaggacctggtggtttgactcgtgaccgtgccggttatgaagttcgagatgttcactatacccattatggtcgtatgtgcccaatcgaaacccctgaaggccctaatatcggtttgattaacagtttggctagttacgctgttgttaaccgttacggcttcatcgaaacaccatatcgccgtgttagttgggatacgcatgatgttactgataagatcgactatttaacagccgacgaagaagataactatgtcattgcgcaagccaactcaccattaaacgatgatggttcattcgttgatgatactgttttagcacgttacaaagatgacaatattgaaacttcaatcgacaagttagattacatggacgtttcgcctaagcaagtagttgctgtcgctacggcctgcattcctttcttggaaaatgatgattcaaaccgtgccttgatgggtgctaacatgcaacgtcaagctgtgccattagttgacccacatgcaccacttgttgggacagggatggaatataaagcagcccacgattcagggattgctttattagcacaacatcccggaactgttgaatacgttgatgcgaaagtgattcgcgttcgtcgtgaagacagctcattagatacgtacgaattaatgaaattccgtcgttcaaatgctggtaagaactacaaccaacgtccaatcgttgcaaaaggcgatcacgttgatgttgatgaaattatcgctgatggaccagctatggaaaaaggtgaattagccttaggtcaaaacccattgattgctttcatgacttggaatatgtataactacgaagatgcgatcgttctttcagaacgtttagtgaaagaagatttatatacttcaatccatattgaagaatacgaatcagaagctcgtgatacaaaacttggacctgaagaaatcacacgcgaaattcctaacgttggtgaagattcattgaaggatcttgacgaattcgggattgtccgtgttggtgctgaagtcaaagatggcgacattttagttggtaaggtaacgcctaagggtgtgacagaattatcagccgaagaacgcttattgcacgctattttcggtgaaaaggctcgcgaagttcgcgatacatcattgaaagtacctcatggtggcggcgggattatccaggacgttaagatctttacgcgtgaagctggcgatgaattgtcaccaggtgttaacatgatggttcgtgtttacattacacaaaaacgtaagatccaagtcggcgataagatggctggtcgtcatggtaacaaagggactgtttcaatcgttgttcctgaagaagatatgccatacatgccagatggtaccccagttgatatcttattgagtcccatgggtgtgccttctcgtatgaatatcggacaagttcttgaattacatcttgggatggctgctagaaacttaggcatccatgttgcaacaccagtctttgatggtgcgcaagataaagatttatgggacgctgttcgtgaagcaaacatgccttctgatggtaagagcattctttatgatggtcggaccggtgaaccattcgatacacgtgtgtcagttggtgtcatgtactacatgaaactagcccacatggttgacgataaactccatgcacgttcaatcggaccttactcacttgttacgcaacaaccattgggtggtaaagctcaatttggtggccaacgtttcggtgaaatggaagtttgggctcttgaagcttacggtgccgcttataccttacaagaaatcttaacttacaagtctgatgacgttgttggtcgtgtgaagacatacgaagcaatcgttaagggtgaaccaattccaaaaccaggtgttccggaatcattccgagtattggttaaagaattacaatcacttggcttggatatgaaggtcttggatatcgataatcaagaaattgaattacgcgatatggacgacgatgatgatgatatcgaaaacatcgatgcattatctaaatacgctaaagaacaagaagccaaaaaggcacaagaagaagctgaaaaagcacaagcagcaaatgctgatgcagtagatccatctgctgaataaagcgtgctataaattatgaggaggtcggccctttgatagatgtcaataagtttgaaagtatgcaaattggtttagcatcttcagataaaatccgtagttggtcgtatggtgaagttaaaaagccagaaacaatcaactaccgtactttaaaacctgaacgtgatggcctttttgatgaacgaatcttcggacctacgaaagattgggaatgtgcttgtggtaagtacaaacgaattcgttataaaggaattgtctgtgatcgttgtggcgttgaagttacacgttcaaaagtgcgtcgcgaacgcatgggacatatcgaacttgcagcaccagtaacacatatctggtactttaaagggattcctagccggatgggtcttgtcttagacatgagccctcgtgcattggaagaaattatttacttcgcatcatacgttgtgattgatccaggcgatacagccttagaaaagaaacaactgatgaccgaacgtgaatatcgtgaaaaattagatgaatacggtaatcgttttaacgctaagatgggtgctgaagccatcaaagaattgttacgtgacgttgatcttgaaggcgaagttgctgaattaaaggaagacttgaagtcagcacaaggtcaaaagagaacgcgtgctatccgtcgtttggacatcttagatgccttccgtaaatcagggaataaccctgaatggatggttatggatgctattccagttattccaccagatttacgtccgatggttcaattggaaggtggccgttttgccacatctgatttgaatgatttgtaccgtcgtgtgatcaaccgtaacaaccgtttgaaacgcttgttagacttgatggcaccaagcatcatcgttcaaaacgaaaaacggatgttacaagaagccgttgatgctttgattgataatggtcgtcgtggccgtccagttactggacctggtaaccgtccattgaagtctctttcacacatgttgaaagggaaacaaggtcgtttccgtcaaaacttacttggtaaacgtgtcgattattctggtcgttccgttatcgatgttggtcctacattgaagttctatcaatgtggattaccacgtgaaatggcacttgaattgttcaaaccattcgtcatgcacgaattagtgaaacgcgatatggcttcaaacattaaaaatgcaaaacgtaaaattgatcgtcaagatgacgatgtttgggatgttttagaagatgtcatcaaggaacgcccagttctattgaaccgagcacctacattgcatagacttggtatccaagcattcgaaccaatcctggttgatggtaagtcaatccgtcttcatccattagcttgtgaagcttacaatgccgatttcgatggggatcaaatggcgatccacgtacctttatctgatgaagcacaagcagaagcaagaatgttaatgcttgccgctcaccatattttggcaccaaaagatggtaaaccaatcgttacaccttctcaagacgttgttttagggaactattacttaacgcttgaacaaaaaggtagtctcggcgaaggcatgatcttcaaagatacaaacgaagttttaatggcttatcaaacaggtcacgttcatttacacagtcggattggtttgtcagttgttgatatggataatcgtccattccctgacgaacaacgccacaagattatggtaacaagtgttggtaaagtgatgttcaacgaaatcatgccaactggcttcccatatttgaacgaaccaacaacagataacttgatgaatggtgtgccagataaatacttcatcgataacggtgaagatattcatgactacctctcaagtgccccagtgattttaccatttaagaaaggcttcttaagtgatatcatcgcgcaagtcttcaaggtatataaggttcaacggacatctgacttattggatgatatgaagaccttaggttacgttcaagcgacccatgctggtttaacagttggggttgccgatgttcctcaattacctgaaaaacaagaaattgttgatgaagcccataagaaagtcacaacggtttctaaacaattccgtcgtgggttgattacagatgaagaacgccatgcgcgcgttattgaaatctggaacgatgctaaagacgatatccaacaacgactcacagattcgtttgatccaacaaacccaatctcaatgatgtctgattctggtgctcgtggtaacatctctaactttacgcaacttgctggtatgcgtgggttgatggctgctcctaatggtgggatgatggaagttcctgttacatcaaacttccgtgaaggcctctctgtcatggaaatgtttatgtctacccacggtgcccgtaaagggatgactgatacggcgcttaagactgccgattctggttacttaacacgtcgtttagttgatgttgctcaagacgttatcattcgtgaagaagattgtgggactgatcgcggtcttctcattcactcaattcgcgaaggtaatgaattaatcgaaccattgtatgaccgtcttgttggtcgttgtgcaatgaagaccattgttaatccaacaacgggtgaagtgatggttcaacgtaaccaattaatggatgaacaacttgctcaagctgttgttgatgccggtgttgaagaagtcacaattcgttctgtcttcacatgtaacacaaaacacggtgtctgcaaaaaatgttacggtcgtaacatggccaacggcgaagaagttgaagttggtgaagcagtcggaacagtcgcagctcaatcaatcggtgaacctggtacgcaattaaccatgcgtaacttccataccggtggggttgccggcggtgaagatatcactcaaggtttgcctcgtatccaagaaattttcgaagcgcgtaatcctaaggggcttgcaacaatcactgaagtaactggtgaagttgttgcggtggaagaaaaccctgcagaacatacacgtgaaatcactgttcaaggtgaaacagatacacgttcatatagtgtgccttacacagccaacgtcatcgttaacgaaggcgacatggttcgtcgtggttctaagttaacgggtggttctgttgatcctaaacaattaattaaagtccgtgacgtcttatcaactgaaaactacctcttgcatgaagttcaaaaagtttaccgtatgcaaggtgttgaaatcggcgataaacacgttgaagttatggtccgtcaaatgctacgtaaagtccgtgtcatggatccgggtgatacagaaatcttacctggtacattaatggatattagtgaatttacagaccgtaaccacgaaaccttaattagcggtggcgtacctgctacttgtcgtcctgtcttgcttggtattacgaaagcatcattggaaacaaatagtttcttatcagccgcatcattccaagagacaacacgtgtcttaacggatgcttctatccgcggtaagagcgatccattacttggtttgaaagaaaatgttatcatcggtaagattgtcccagctggtactggtatggcgaagtatcgtcatatggaacctaagacagtcggtgctgtatcagaaaatgtctactcaatcagtgacatcgaagcacagatgaaagaagaaacaaaagaataactgagtgccaatttagaacagttgctctaaattgcacgttaaagggcctcaccgacatggtgaggcccttttttatgtgtttacaataaacaaaacgattaagacaccgtagctgatatacgggacaaatggaattgggcggcgtccgactaaggcgaggacaactggatggtggagactatcaatgagatatttgattaaacagaggagacaggcaattaataacatggatagggtgacctccaatccaaaccacaacccaagaattgccaataattcaatgtcaccagtaccgatgccatctgaaaagtagttgatgacagataaggtgctgccaatcaatagggcactgagccaatggtttgtcggccagtagtcaataaacaaaggcataaaagccagtaccattggaactgggtatagagctgtatggaaaatatcgactaggctcaacaaataaaggataagcaataaatagccaatctgtggtgtgaaatattgactggctaagcaacacgctaacaagccgccaataacctcactagtaaaaaaatggtgctggattcgagtatcacaatagcggcagtgccctctgagaatgaggtaactgataattggacataagtcgtaccaagcgagggcgtgatggcagaagtcacatcgtgaaccaggccatgtgatggataaaccaagtggccaacgccaagcacaaacggttaaaaaagaggcgcaacacgcgccaataacaaaggttaaaaaatatattaacaaacgtgtcatctcctttatgataactacgaaaaaagggcgcaactttttctgaaaaactggcttatagcacgttgactttcgtagttgtgcatgctattcttgtagatgtgctttttacggaagttttctgatattcagacatgctgactgacgtctaaaaatgcattacaatccacgcaatctaggttgccatttttttatcgcaaaaaaagaaccacctggatgtgtggacttaaaactcaaaaataactttcagatcaaggaaggaggaaccttcaaatgccaacaattaaccaattggtacgtaagggtcgtaaatcaagaacttcaaagtctgatgcacctgcattaaactttggctacaacagtatgaagaaaaaagctacagataatccagcaccacaaaaacgtggggttgctactcgtgtgggtactatgacacctaaaaagcctaactctgctttacgtaagtatgcgcgtgtgcgtttatctaacttaatcgaagttacagcttatattcctggtattggtcataacctacaagaacatagtgttgttcttatccgtgggggccgtgttaaggatttacctggggtacgttatcatgttatccgtggtgctttagatactgccggtgttgacggtcgtatgcaaagccgttctaagtatggtactaagagacctaaaaaataacacacaaaaaaatttgaaaaagtcgattgaagtttaaatgacactgtgtgttacttcaaggacttaaatatcttgaggaggttatcaggatgccaagaaaaggctatgttgcaaaacgtgacgttttacctgatccaatgtacaattctaaattggtttcacgcttaatcaaccgcttaatgattgatggtaaacgtggtactgcgtcaacaatcttatacgatgcatttgatattattaaagaagaaactggtaatgaaccattagaagtgttcgaagaagctatgaacaacatcatgccagtacttgaagttaaagctcgccgtatcggtggttctaactaccaagtaccaattgaagttcgtccagaacgtcgtgcaactttaggtttacgctggttagtaagctatgctcgcctacgcggggaacataccatggatcaacgtcttgcacgtgaaatcatggatgctgccaataacactggtgctgcagttaagaaacgtgaagatacacataaaatggctgatgccaaccgcgcatttgcacattatcgctggtaagattaacaaggttggctgttatatgtattcaaatcatataatggcctcttgttgtatatagcttaatattcgagaggagtaatattcacttatggcaaacaaacgtgaatttccgttagataaaacgcgtaatatcggtatcatggctcatattgatgctggtaagacaacaaccacagaacgtatcttgtactacactggtaaaatccataagatcggtgaaacccacgaaggggcttcacaaatggactggatggaacaagaacaagaacgtgggattacaattacatcagctgctacaacagctgaatggaaaggtaaccgagttaatatcattgatacaccaggacacgttgatttcacaatcgaagttgaacgttcattgcgtgttttagatggtgcaatcactgtcttagatgctcaatcaggtgttgaacctcaaactgaaaatgtttggcgtcaagcaactacttatggtgttccccggattgttttcgttaacaagatggacaaacttggtgctaacttcgattactcaatgacaacattggaagatcgtttacaagctaatgcacatgctgttcaaatgccaatcggcgctgaagatgaattccaaggcgttattgatttgatcgaaatgcaagctgacatctatgatgaagatgaattaggtgctaagtgggatacagttgatgtacctgctgactaccttgaagaagctacaaaacgtcgtgccgaattagttgaagctgttgctgatgttaatgacgacattatggacaaatatttagaaggcgaagaaatttctaaagatgaattgaaagctgctattcgtcaagcaactatcgatttgaaattcttcccagttttcgctggttcagctttcaaaaataaaggtgttcaaatgttaatggatggtgttgtagattacttaccatcaccattagacgtacgtccttataacgctaaaaacccagaagatgattcagaagttgaattgatggctggcgatgacaaaccatttgctggtttagcatttaagattgctactgacccattcgttggtcgtttaacattcttccgtgtttatactggtacattacaatctggttcatacattttgaatgcaactaaagacaaacgtgaacgtgttggtcgtttattacaaatgcattcaaatcaccgtaacgaaattcctgaagtattctctggggatatcgctgctgcaatcggtttgaagaatacaacaactggtgattcattgactgacgttgatcatccattaatcttggaatcaatggaattccctgacccagttatccaagtttctgttgaacctgaatcaaaagaagatcgtgataagttagatcttgctttacaaaaacttgctgaagaagatcctacattcaaggctgaaaccaacaatgaaacaggcgaaacgcttatttctgggatgggtgaattgcatttggatatcatggttgatcgtatgagacgtgaatttaaagtggttgccaaaattggtgaacctcaagttgcttaccgtgaaacattcacaaaacaagcatctgcacaaggtaaattcgttcgtcaatccggtggtaaaggtcaatatggtgatgtttgggttgaatttacacctaacgaagaaggtaaaggcttcgaattcgaagacgctatcgtcggtggtgtggttcctcgtgaatacatcccatcagttgaacaaggcttgaaagaatcaatggcaaacggtgtcttagctggttacccattgattgacgttaaagctaagttatatgatggtagttatcatgatgtcgattctaatgaatcagcatttaagattgctgcatcaatggcattgaagaacgctgctaaacaagctggcgctgaaatccttgaacctatcatgaaggttgaagttattgctcctgaagaatatcttggcgatatcatgggacaagtaactgctcgtcgtggtgctgttgaaggtatggaagcacgtggtaatgcccaaatcgttaatgcaatggtaccattgtcagaaatgtttggttatgcgacaacattacgttcagctacacaaggtcgtgggacatttacaatggtatttgaccactactcagctgttcctaagagcatccaagaagaaatcatcaagaagaacggtggccaataagccgctaatcttaagtgattggtttcgattggaaaaggactcgtcattgcgacgagtcctttttttgtgcgtaaaaatgcgattttacagtttcgtaaatgaaagttcatatttaattcataactggttggtattctgtatacatcagatgaattcctcccaagaaataatctgaaaaggtaaaaatgcttttcaaggtggttagcttttgagcataacatagcgaggataatgagcaacgaaggtgatcgttgtcttcgcgtagttaggcggaaaaagttaccttgaaaagcaagattaaatgaattttcattagacaattcctccctaaagaatccgtctaagtaaagcaccgccaatgagttatagtttaatggtaaaacgaaccggcccatttgaaattcctcccaagaacagtgaatggttttctggtgattgatagagacttgctttcgaaggcgtaaggatttgttgatcattaagactggttcatgcgggttcaatccccgctaactcgatttgccaccgccctggcaaaaaaactcaaactctttttcatataaacttctccaaaaaagggagttacgacaaaaatcacttttgtcgtaactccctttttgtgtttctaggcacggcttactgagttagttttgttttgtaggacgtgttttcaaactgcccatcagacgtttaacctttgcttgttcgatttcgcgggcggatagttgactatagtccgcttcgatagccagtttattgaaatcagctagccgttcaggcattaatgaacctgcatcgattgcggctcgtacggcgcaactgggttcgctttgatgctggcaatccttaaatcgacagtcctgtgcgagcgtctcaatatcagtaaagactgtcttgagtgccttagacatgctacttgtcatgccgagttcgcgcatgccaggagtatcgacgatgaaggccccgctagcagtttgacaggcttgtcgattggtggttgtgtggcgccccttatcatcgtcagcgcgaatgccgctcgttaaaacggaaggctctttaatgagctggttgatcagggttgatttaccaacgccggatgagccgacaaatgtcacccattgtccagctgttaaatacggtttgaaagtcgctgcaacatttgatgccgtctggccagttgtgatgacgggaacgctgtcgaatgtcacacttgcgatggcgtcaagaaaggttgttagctcagagtcgctgactaaatcggttttactcaaaacgatcaccggtgttgcgccgctatcccaagccatcgttaaatagcgttgtaagcgcgcttcgctgaattcttgattggcggatgttacgatgaaaatcgttgcaatattggccgctaaagtttgaatccgttgttgcttattactgttgtgtcgttgaataagcgtgtgccgggggagatgtccttggatttggaaataatccgtatcatagatcacgccggttacttgatcaccgacaacgggcaggtcgttagtgctttctgccaagtggcgataccgaccgctgattgttgcggttaattcttgatgattgagtaggactttgtaatggccttggctttgaaaaattaaaaaagctgtttgttgtgtttgcatgatgatgcgcctccagtgtgttatttcatgatgatctaaatgaaataatggcggcactggctatctaagcagcgaataccgccattgatagcacaattgctgtgtttgtttttaacataaaaagaatctcctttatatagaatgggtacattgtcccgtcatttaagataacagatgatcgttaaaagtcaaattagataattgtagctccgaggctgtttttaaaatgcgcgagtgcccattcttgcccgttcggtgtaaaagttgcgacagcagcggctggaattgttagtgggtaatttaagttgtatgccgagactgcagtgtggagcacgcaaatgtcggtgcaaacgccagtcagtgttaacgcgtcaatctcgcgctcgcgtaagaaattatccagattagtgttagcaaatgctgaatagcgattctttgcaaatgcatagacgtgaggatcggtttggtgcttggtgtaccagctagctagtggtccgtaaaactcacggccccaagtattggctagattatgtggtgggaatagggcgctctctggatgaaatggatcatccttgacgtgtaagtcagtcggtaagatgacgtaatcaccggctgctaggaactggttagctaattcgataattacaggaacgatttgctgagcgggtttgccggctgtcagagcaccgtttgggtcaacgaagtcatttgtatagtcgataatcaaaagtgcgttatgggacataataaggacctcctggaggggatttaagttgctttcagtgtatcaaaacatggctagaaatccacgaatgacgcttgctacaagatttatgaaaatgttatgaaaaactttgataaatcagcaaaaaagggttgcgttatcgggttgtatcttgtaagatagataaagtgctatttccatagcaggagtgcgcaccatggtagtcaaaaagattaccgagtagctaagatgtgagaggttgcgacacacccggccgctttgccatgggcgggcgtgccggaaaaattttcacggagctagtctacttttaaaatagacgaaggagggaaaaacatggcaaaacaaaagattcgtattcgtttgaaagcattcgaacaccgtattttggatcaatcagctgacaagattgtggaaacagcaaagagaacaggtgctactatctctggcccaatcccattaccaactgaaagaacactttatacagtgcttcgttcaccacataagcataaagattcacgtgaacaattcgaaatgcgtacacacaaacgtttaatcgatattgttaaccctacacctaagacagttgattcattgatgaaacttgacttaccaagtggtgtagatatcgaaatcaagctttaattcgtaccaaccaattaaaaatactagaaaagaggtgttaccatgaccacaaaaggaatcttaggtagaaaagtaggtatgacacaagtctttactgaaaacggcgaattaattcccgtaacagttatcaaagcaactccaaacgttgttttacaagttaaaacaaacgaaacagacggctatgaagccatccaagttggttttgaagataaacgtgaagtcttgtcaaacaaacctgctaaaggtcatgtagcaaaagcaaatactactcctaagcgcttcattagagaattcagagatgtcgcattaggagattacgaagtaggaacagaaatcaaagttgatactttcgcagccggcgacgtcgttgacgttactggtgtaacgaaaggtcatggtttccaaggtaacattaaaaaagacggacaatcacgtgggcctatgggtcacggttctcgttaccaccgtcgtcctggttcaatgggtgctgttatcaaccgtgtcttcaagggtaaattattacctggacgcatgggtaacaaccaacgtactgttcaaaaccttgtggttgtaagtacagatgttgaaaagaacgttatccttgttaaaggtaacgtgccaggtgctaaaaactcaatgattacaatcaaaacagctgttaaagctcgtaacaaataatctgagaagggaggattttaccaatggcaaacgtaacattatttaaacaagatggtagccaaaatgggaacgttgaattaaacgactcaatctgggctatcgaacctaacgaaaacgttgtgtttgatgcaatcatcatgcaacgtgcttcattaagacaaggaacacacgctgttaagaacagatcagctgttcgtggtggtggtcgtaaaccttggcgtcaaaaaggtacaggtcgtgctcgtcaaggctcaatccgttcacctcaatggcgtggtggtggtaccgtatttggtcctacacctcgttcatacagctacaaattacctcgtaaagtacgtcgtcttgcaatcaagtcagtactttcacaaaaggttatcgacaatgatttagttgttgtagatgcattcaactttgacgcacctaagactaaagaattcgctgaagtacttaacaagttagacgttaatactaaagcattggtagtacttgaagacggaaatgattttgctgcattatcagctcgcaacttacctaatgtaactgttgtagctgctgatggtatcaacgtattagacgttgttggcaaccaaaaattaatccttactcaagctgctctttctaaaattgaggaggtgcttgcataatggaagcacgcgatgttattttacgcccagtagttactgaaaattcaatggctgcaatggacgacaagaaatacacatttgatgttgatgttcgtgccaacaaaacacaagtgcgttacgcaatcgaagaaatctttggtgtaaacgttaaaaacgtaaacatcatgaacgttcgtggcaagttaaaacgtcaaggtcgctatgctggctatactaaaaaacgccgtaaagcaatcgttactttaactgctgattcaaaagaaatcaagattttcgaagattaagcaacacttaaatagaataattataggagggtatacacgtgggaattattaagtacaaaccaaccacaaatggtcgtcgtaatatgaccagctcagattttgctgagatcacaaagacaacccctgaaaagacgttgttggaatcccaaagccatactgctggtcgtaatgcacatggtcatatcactgttcgtcatcgtggcggcggtcataagcaaaaataccgtgtcatcgacttcaaacgtatcaaagatggtatcaaagcgactgttaagtcaattgaatacgatccaaacagaacttcaaatattgcattaatccaatatccagatggtatcaaagcatacatcatcgctcctaaaggtcttgaagtaggcatggttgttgaatctggtgtggatgccgatatcaaagtaggtaacgcattaccattagctaatattcctgatggtacacttatccataatgtcgaattaaaacctggtaaaggcggccaattggttcgttcagctggtacatcagctcaattattaggtaaagaaggcaaatacgctatcgttcgtttaacttctggcgaaacacgtatgatcctacttacatgtcgtgcaacgatcggtactgttggtaacggtcaacacgaattaatcaagattggtaaagctggccgtaaacgttggatgggtatccgtcctacagttcgtgggtcagtaatgaaccctaacgatcatcctcatggtggtggtgaaggtaaagctccaatcggtcgtccttctcctatgtctccatggggtaagaagacgcttggtaagaagactcgtagtagtaaggctcgttcagagaaacttattattcgtcatcgtaaatcaagataatcaattccaattgaacatgtctaaagccaatgcggcttaaacataagtcacattgaactttttattcgaaggaggtttcataatgagtcgtagtttgaaaaaaggaccattcgcagacgcacacttgctcaacaagattgaagcacaagccgatagcgaaaagaaacaagtcatcaagacttggtcccgtcgctcgacaattttccctagctttattggctacacaatcgctgtttatgacggacggaaacacgttcccgttttcatctcagacgatatggtaggccataaattaggtgaattcgtaccaacaagaactttccatggtcatggaaatgacgataagaaaacaaaagcacgctagaaaggaggatgaactcaatggcagatcaaattactagtgcaacagctagcgcaaaatcagttcggatggcagcccgtaaagtacggatggtagtcgacttgattagaggcaagagcgttgcagaagcaattgcaatcttagaatttacaccaagagctgcttcaccagtcgtaatcaaagttttgaaatcagctatcgctaatgcagaacataattacgacttagatgcagaaaacttggtcgttacagaagcttatgctaacgaaggaccaacattgaaacgttttcgtcctcgcgctaaaggctcagcatcaccaatcaacaaacgtacaagtcacatcactgtagttgtatcagaaaaagaagcataaggagggatatcgcgtgggtcaaaagattaatccaaccggttttcgtgttggcgtcatccgtgattgggacgctaaatggtatgcagaaaaagatttcgcaacattcttacacgaagatcttaagattcgtaaatatatcaacacaaaattagctgacgcatctgtctctactattgaaatcgaacgcgctgcaaatcgcgtgaacgtttcaatccatactgctaaacctggtatggtcatcggtaaaggcggttctgaagtagaaaatctacgtaaagaattaaacaacttaacaggtaagaaagtacacatcaacattgtggaaatcaagaaacctgatttagacgctcacttagtaggtgaaggcattgctcgtcaattggaagcacgtgttgctttccgtcgcgctcaacgccaagctatgcaacgtacaatgcgcgctggtgctaagggtattaaaactcaagttgccggccgtttgaacggtgctgacatgtctcgtgtcgaaacacatgctcaaggaactgttcctttgcatacgctacgtgcagacatcgattattcatgggacgaagccatgactacttacggtaaattaggagttaagacttggatttatcggggcgaagtattacccgctaaagccaacaacaatacgaaaggagggaaataaacatgttagtacctaaacgtgtaaaacatcgtcgtgaattccgtgggaagatgcgcggtgctgcaaaaggtggcaaagaagtcacttttggtgaattcgggctacaagctttagaatcaagttggattaccaaccgtcaaatcgaagctgctcgtgttgccatgactcgttacatgaaacgtggtgggaaagtgtggattaaaattttccctcacaaatcatacactgcaaaaggtgtcggcgttcgaatgggttcaggtaagggtgctcctgctggatgggttgctgtagtaaaacgtgaaaaagtcatgtttgaaatcggcggcgtttctgaagaagttgctcgtgaagcattacgcttggcatcacataaattgccagttaaaactaagatcgtaaaacgcgaggaagtaggtggcgagtcaaatgaaggctaaagatattattgaattaaccactgctgaaatgcttgaaaaagaacaccaatacaaagaagaattattcaatcttcgtttccaacaagctaccggtcaattagaaaataccgcccgcttaaagcaagttcgtcagaacattgcacggattaaaactgtattacgtcaacaagaacttaacaaataataaatggaaaggagctatttactttgagcgaagaaagtcgtaaccatcgtaaagtgtaccaaggccgtgttgtttcagacaaaatggataaaacaattactgtcgtggttgaaacttataaaacacatcctgaatatggtaaacgtgttagatattcaaagaaatattatgcacaagatgacaacaacgaagcaaaagttggcgacgttgtgcgtgttatggaaactcgtcctttgtcacgtacaaaacggttccgtttattagatgtcgttgaaaaagcagttattatctaaatcgttactcaatatatatataagtgacggaaggaggacctataagtgattcaatcagaaagtcgtcttaaggttgctgataactccggtgcccgcgaaattttaactattaaagttttgggtggttcaggtcgcaagactgctaacatcggtgatgttatcgttgcaacaattaaacaggcaacaccaggtggcgttgtcaaaaaaggtgaagttgtcaaagctgttatcgttcgtactaagtcaggtgctcgtcgtgtagacggttcttacatcaagttcgacgaaaacgctgctgttatcatcaatgatgacaagactccaaaaggaacacgtatcttcgggccagttgcacgtgaattgcgtgacagtgatttcatgaagatcgtttccttagcgcctgaagttctataattacagacaaccaaggaggtgcgtatatcaatgttcgttaaaactggtgataaagttaaagtaatcagtggtaaagataaaggtaaagaaggtacaatcatcaaagctatgcctaaagaaggccgtgttgttgttgaaggtatcaataccattaaaaagcatgttaagccaaatgctcaaaaccctaatggtgggattgttgacacagaggcaagtatcgatgcttcaaacgttatgctaattgatccatcaaccaacgaagctactcgtgtaggtttcaaagtgattgatggtaagaaagtacgcgtttcaaagaaaactggagaatcaatcgataaataatcttttggggaaaggaggcactttttacatgactaaccgtttaaaagaaaaatatgttaaagaaatgacaccagcgttgatcgaaaagttcaactacacatcaagcatgcaagtacctaagatcgaaaagatcgtacttaacatgggtgttggtgatgctgtttcaaacgctaagaatttggataaagctgttgaagaattaggtttgattgctggtcaaaaaccattaatcacaaaagctaagaaatcaatcgctggtttccgtttacgtgaaggtatgccaatcggcgctaaagtaactttacgtggcgaaagaatgtacgatttcttagataaattagttaacgtatctttacctcgtgttcgtgattttcacggtgttagtgcaaaatcattcgatggtcgcggtaattatacattaggtgtacgcgaacaattgatcttccctgaaatcgattatgataaggtagatcgcgttcgtggtttggatgttgttattgtaacaacttcaaatactgacgaagaagcacgcgaattgttaacacaatttggcatgccatttgctaaataaaaagggaggtcaatttcttggctaaaaaatctttagttgtaaagaatcatcgtccagcaaaattttcaacacaagaatattcacgttgcgaacgttgtggacgtccacattctgtatatcgtaagtttaagctttgccgggtttgcctccgtgaattagctcataagggccaaattccaggcatgaaaaaagcaagctggtaattataaagagtcaataaggaggttaattccacatggtcatgacagatccaatcgcagactatctaacacgtattcgtaatgccaacatggtacatcacgaatcattagaagtccctgcttcacgtatgaaaaaagaaatttctgaaattttgaaacgcgaaggctttatccgcgattacgaagtgattgaagacgacaaacaaggtatcatccgtgtattcttgaaatatggtaagaataacgaacgtgttatctctggtttgaaacggatttcaaaacctggtttacgtaattacgttaaagctaatgatgttcctaaggtattaaacggcttaggcatcgcaattatctcaacaagcaacggtgtcgtaactgacaaagaagctcgtgaaaaggctgccggcggcgaagttctcgcatacgtttggtaatctaaacttaaaataaggaggtgtcataacgtgagtcgtatcggattaaaagtaatcgaagttcctgcaggtgttaccgttactaaagacggtgaaaacatcacagttaagggacctaaaggtgaactaacacgtcatttcagtccagtgattgaaatgcacgaagaaggtaaccttatcaactttacacgtaatagtgaaagtgatcgtgcaatgcacggtactatgcgtgctaacttaaacaacatgatcttgggcgtaacggaaggtttcaagaagacattggatcttatcggtgttggttaccgtgctcaattgaaaggcaagactttagtattgaacgttgggtattcacatccagttgaaatggaagccccagaaggcgttacagtcgaagtcccatcaaacacaaacatcatcatcagcggtattagcaaacaacaagttggccaattcgcagctgaaatccgtgatgttcgtcctccagaaccttacaaaggtaaaggtattcgttatactgatgaatatgttcgccgtaaagaaggtaaaactggtaaataaagcagcctgagctgttaaacgatattaagaggtgaaaattgtgattacaaaaccagacaagaataagacacgtcaaaaacgccatacacgcgttcgtggcaagatctctggtactgctgactgcccacgcttgaacgttttccgttctaacaaaaacatctacgctcaacttattgatgacgtagcgggtgtgacgctagcaagtgcctcaacattagataaagaagtaaaagcagaaggtactaaagtagaacaagcacaacaagttggcgcattagttgcacaacgcgctgttaaagccggccataaagttgttgtttttgatcgtggcggttacttataccacggtcgtatcgaagctttagctacagctgctcgtgaaaacggactagaattctaataaggaggaaaaccatttatgacttacattgatccaactcatttagatttagaagatcgcgttgtttcaatcaaccgtgttacaaaagttgttaaaggtggacgtcgtctacgtttcgcagcaatcgtaatcgttggtgataaagacggtcacgtaggtttcgggacaggtaaagcacaagaagttcctgaagctatccgtaaagccgttgaagacgctaaaaagaatcttatcaatgttcctaaggtcggaacaacattacctcatgaaattattggtcgcttcggcgctggtcgtgttctattaaaaccagctgttgaaggttctggtattgctgccggtggtgctgttcgtgccgtcatggaattagcaggaatcgatgatgtgacaagtaaaacattaggtagcaaaactgctatcaatgttatccgtgccacaattgacggtttaactcgtatgaagactgctgaagaaattgcagaattacgtaatgtatctgtagaaagcttacaaaactaggaggataactgaacatggctaaattaaagattactttaagaaaaagtgctgctcatcgtcttccagaacaacgtaaaatggtcaaagaatttggcttgaaccgagtaaatagttctgtaatcaaaccagatgatgctgcaactcgcggtgtgattttcaaactcgcacatttagtaacagtcgaagaaattaaagactaatttcaacatatattgcaaggaggtgcgcacaataatgaaattacatgaaatgaaacctaacgaaggtgctcgtgacgttcgtaaacgtgtcggccgtggtacttcttcaggtactggtaaaactgctggtcgtggtcaaaaaggccaaaaagctcgtagtaaagtacgtttaggatttgaaggtggacaaatgcctttattccgtcgtatgccaaaacgtggattcaagaatatcaaccgtaaggaatatgctgttgtcaacttaaacgatttaaatcgttttgaagacggtgcagaaattacttcaactgttttaatcgaagcaggcgttgttaagaatgaattatcaggtgttaaattattagcgaatggtgaattaaacaaaaaattgaacattaaggtaagcaagtattctgaagctgcaaaagctgctgtagaagctgctggcggttcaattgaggtgatttaattgctaaagacactcaaaaacgcatttaaagtaaaggaaatccgtagtaagattttgtttactttaggcgttttgatcgtttatcgtttaggtgcacaaattacggtaccaggtgtgaatgctggtgcattgactaagttgggttcaactggtttgatcccattgcttgataccgtaagtggtggtggcttggcgaactattccatcttctcgatgggggtttcaccattcatcactgcccaaattgtggttcaattactacaaatggatattgtgcctaagtttgttgaatggagcaagcaaggtgaagttgggcgacgtaagcttaaccaagtaacgcgttacttaaccatcatcttagcgtttatccaatcgatagggattaccgctggctttaactcactcagtcaaatgggcttggttaaagatccggggattaagaccttcgttagcatcgggatcattttaacgggtggtacgatgttaattacatggttgggtgaacagataacggataaaggcttagggaatggtgtgtcaatgatcatctttgcagggatcattgcacgccttccaagcggtctttaccaaatcttccgcgaacaagtcttgaacgcttcaaaaggcgatatgtggaaaggtgtcttattcatcatcggtttgattattgcagtactcgtgattgtcacatttgtgacatgggtccaacaagcaaatcgaaagattccgattcaatatacgcgtcgtgaagctggtgcaggtgaaaatagttacctaccccttaaagttaacgtcgctggtgtgattccggttatcttcgccagttcatttattatgacacctcaaacaatcttaatggccttccaatcaggtcatggtgcagatacttggtttaaagtattatcagatatcttcagcatgcagactgtgacaggttcgattgtttatacggtgctcattgttctctttaccttcttctatgcttttgttcaggttaaccctgaaaaagttgcggagaacttgactaagcaagggagttatatcccaggtgtttggccaggtaaaggtaccgagaagtatctttctagcgtattaatgcgtctttcaactgtcggtgcgttgttccttggggtaattgcattattaccacaattagcagcaaacctcggtggcttaccccaatcaattggtttgggtgggacgagtttactaatcgttgttggtgttgcgcttgaaagcacacgtcaactcgaagggttacttatgaaacgcaagtatgttggattcattcgataagcaattatcgtttaaaaagtattaaatcctggttttaaataggaggcaaaggcatgaatctcatgttaatgggacttcccggcgctggtaagggaacgcaagctgaaaagattgttgacgcttatcatattccacacatttcaactggtgacatgttcagagctgctatggcagatcaaacagaacttggggttaaagctaagtcattcatcgataaaggtgaattggtaccagatgatgtgaccaacggaattgttgaggaacgtcttgcacaagcagatactaatgtaggttatctccttgatggttttcctcggactcttgatcaggcggatgctttagctgccattactgataaattgaacaaacctttagatggtgtgattaacattgatgttgatcctgaaatcttggctgatcgtttatctggccgctttatttgtaaaaattgtggtgcaacgtaccacaaactttaccatccaactaaagtggaaggtacatgtgatcgttgcggcgaacatgttttcttccaacgagaagacgacaaacctgaaacggttaagaatcgcttaaaggtcaatatcgaaatgaatacacctttacttgattattatgaaaaacgtaacctactttacacggtagatgggaatcaagaaattgatgatgtgttctctgccgttcaaaaagtacttgataccattaaagactagtcatcaactcaagtgatctcacggtcattgttcacgtaaaagcctgactagttgtttaatgacagaattctcagtgcttttaaaaatttaatacttgtgatataatatctcggtatgaccactagcggtgagtgcggagagctctcaccatttttctgtatgaattttcacaaccacaagggggtacttttgcgtggcaaaagatgacgtcattgaaattgaaggtaaagtaactgatactttaccaaatgcaatgtttaaagtagaacttgaaaatggtgcagttattctggcacacgtttctggtaaaatccgtaagaactacatcaagattttacctggagaccgtgtgacagttgaattgtcaccctatgatttgactaagggacgaattacgtatcgctttaaataggcgtaaggatcatatcaaggaggtcagtcgatatgaaagtaagaccatcagtaaaaccaatgtgcgaacattgtaaagttatcaaacgaaaaggccgcgttatgattatctgcgcagctaacccaaaacataaacaacgtcaaggttaatattaattaagcaggaggtgcaagaatggcacgtatcgcaggtgtggatttaccacgtgataaacaaattgtgattgctttaacttatattttcggtatcggaaatacaactgccgttaaagtcttggctgatgctggcgtcgcagaagacgtccgtactcgtgatttaacgccggatcaagaagacaagatccgtgcagcaatcgacaaagttaaagttgaaggcgatcttcgtcgtgaagttagcttaaacatcaaacgtctacaagaaatcggttcttatcgtggcatgcgtcatcgtcgtggattaccagttcgtggtcaaaacacgaagaacaacgcacgtactcgtaaaggtaagaaagttacgattgcaggcaagaagaaataatcagtaaaaggaggttataatttatggcaaacaagaaaaatgctccacgtaagcgtcgtgtgaagaaaaatatcgaagccggcgttgcacatattcactcaacatttaacaatactcttgtgatgatcactgatcctcatgggaatgctgttgcatggtcatctgctggttcattaggtttcaaaggtagtcgtaagtcaacaccttttgctgctcaaatggctgcagaagctgctggtaaagaagccatggaacatggtatgaaatctgttgaagttgctgttaaaggaccaggttctggccgtgaagctgcaattcgctcattacaagcaactggtttagaagttactgctattcgtgacgttacaccagttcctcataatggatctcgtcctccaaaacgccgtcgtgtttagtctgggctacgcttcattttgagacaaactgaaacgtgttcacgtataaacacttctcgttttgaaaggggtaaaagataagaatgatcgaatttgaaaaaccaaacattacaaaggttgatgaaagtactaactacggtaagttcgttgtagaaccacttgaacgtggctatggtacgactttaggtaactctttacgtcgtattttactcgcttctttaccaggtactgctgtcacagatattcaaattgatggtgttttacatgaattttcaacaattgatggcgtcctagaagacgtaacacaaatcatcttgaatattaaaaaattagcacttaaattgcatgttgaagaagacaagacaattgaaatcgatgttaagggtccggcaacagttactgctgctgatatcatttctgatgatgacgttgaagtcttaaatactgatcaatatatttgtacagtagctgaaggcggcaatttccacgtgcgaatgacagttaaaaaaggccgtggttatgttgctgctgatcaaaacaagtcagacgatatgccaattggtgttttgccaatcgactcaatttataccccaatcagtcgtgtcaactatcaagtagaaagtacacgtgttggtcgtcgtaacgatttcgacaagttaacacttgatgtttggacaaacggttccatcagtcctagagaagctattagcttagctgcgaagattatgacagagcatttggcaatctttgtagatcttactgatgaagcgaaaaatgctgaaatcatggtcgaaaaagaagagacacataaagagaaaatgcttgaaatgacaattgaagagttagatttatcagttcgttcatacaactgtttgaaacgcgctggaatcaacactgttcaagagttaactgacaaatcagaagcagatatgatgaaagttagaaatcttggtcgcaagtcgttagaagaagttaagaacaagttatttgatcttggcttaggcttacgcacagaagaataaactgataagaaggagggactccattcatgagttatcgtaaattaggtcgcacaagctcacaacgtaaggcaatgttacgtgatttgacaactgatttaatcatcaatgaacgtatcattactacagaagctcgtgccaaagaaattcgtaaaacaactgaaaaaatgatcactttaggtaaacgcggtgatttacacgctcgtcgtcaagctgcagcattcgttcgtaacgaagtagctgatattcgcgaagaagacgatgctgtaatcgttcaatctgctttacaaaaattatttagtgacattgctccacgttatgctgaaagaaatggtggttacacacgtattcttaaaacagcccctcgtcgtggtgacggtgcattaatggtgattattgaacttgtttaatcacaaaatgatttaggtcatttgatcgatgagacagggcgttatgatgatggaagtactccgagtctagtcctaaggtcatactagcaacacagtatggctttcatcgattgatgatttacataaaataacgtctaattccgagttaaatcggagttagacgttttttgtgttggatatcctttgaataaagggtgactaacgaaagcgctatggccttttatatgataaaataggaacaggtttttgatttgaaacgtgcatggataacataaccaatgcactttaattccaaggaaaatacgggttattaatcatgaatgagcaaaaaataattcaagttgaacatttaaaatatgaatacccacaatctgaaggacatttagcactgaatgatctttctgtcagtatcaatgccggcgaatgggtcgccattatcggtcataacggtagtggtaagagtaccttcgcgaaatcattgaacggtttgttagatttacaatcgggatcagtgacgattgatgggttaccattgtcgttggataacgtgtggactattcgccagaaaattggcatggtttttcagaatccggataatcaatttgtcggtgcaacggttgaagacgatgttgcttttggtctcgaaaatcaggggattccgcgagctgaaatgattgaacgggttaaagacgcggttgaacgtgttggtatgagtgaatacttgaaacgtgaaccaagccgtttgtcgggtggccaaaaacaacgagtggccttagcagggatcatcgcacaacaacctgagattctgattctcgatgaggccaccagtatgctagatccaaaagggcgcgaagaagttctcgcaaccattcataagttaaaacaagaaacaaacatgaccgtgctatcaattacccacgatattgacgaagccgcaagtgcggaccggatcattatcttagataaggggcaagtgcatgatcagggcacaccggccgatatttttgcatatgggcaacgtttgcttgatttagggctagatgttccatatccagaaaaacttaaagcagcgctaaatgaacgcgctatcgagatgcccacagattatctcacaacggaaaggatggttgagtacttatggacattacattcaaaaatgtaagctacacttatcagccaggcacgccttttcaagggattgggctagaaaatatcaatgtgaccattccaagtggctcctatacggctttgattggtcatacaggtagtggcaagtcgacattgctccaacacctcaatgcactcttaaaaccaacgagcggcgttgttcagattggtgagcgcgaaatcacgcctgagaccaacaacaaaaacttaaaggctgttcgtcaaaaagttgggatggtttttcaatttcctgaaagccaattatttgagtcgacggtgcaaaaagatattgcttttggtccgcagaacttcggtgtccctgaagctgaagcacttgaacgcgctaaagagatgattgaactcgtcggtttacccgctaacgtgattgacaagtcaccttttgatttatctggtgggcaaatgcgccgcgttgccattgctggtgtgttggcaatgaaaccggaagtattggtcttagatgaaccaaccgcggggctcgatccagttggccggcgtgagatgatgacgctttttgaaaagttacacaatgagcaggggatgacgattgtgatggtcacccatcagatggatgatgtggcgaactacgccgacaacgttatcgttttggaacatggcaagctagctaagaccggagcaccacgcgaaatttttgcggatccggattggttaacggaaaaacaacttggcttaccaacaacgactcagttcgcgcaagctttaatgcgacaaggctttgtctttgatcaagtaccactaaccgaacatgaattggccgccttattagcggaacaactaccgaagaaggcggggattggacatgaataaattaattctgggccgatatatccccggtgattcagtgttacaccggatggatccacgggcgaagttattagccagtttttattatattgggatcatctttttagcgcgtacatggcaagcctatgctttattactggtctttacgttagcgctaatcgggatttcaaaaattaaactcgacttctttattaaaggagttaagccgctgttatggctaattctatttacagtgctcttacagattttcttcacccgtggtggtcatgtctattggcagtggggatttctgacgcttacccagtacgggctgattaatggcgtctacatcttcatgcgctttgtattgattattttcatgtcgactctcctgacattgacgacgccgccattgtcgttagcggatgcgattgaatcaattctcaagccgcttaaagtagtccattttccagtgtatgaagttgcattgatgctatcaattgcattgcgctttgtaccaacattgatggatgaaaccactaagattatggatgcgcaacgtgcgcgtggggttgattttggtgaagggaatttattccaacaaatgaaagcaatcgtgccgattttaattccgttatttgtcagcagttttaaccgcgcggatgatttagcaacggcaatggaagcacgggggtaccaaggtggcgaaggccgcagtaagtaccgaattttgaaatggcggacaagagacaccgtggcatttatcacgatgggccttttaaccgtcgcacttttattcttaagataacgcaaaaaggactcagttaaaccaacggaggttgatttagctgagtccttttttttgcacttttttgattagcttgtttttttgaaccgacgtttcaacgttgaagcactaatgccagtttggtaactaatttgagcgtacgtaaagccctcttcacgcatgtctagggctgcttgtatgtcatcatcagtataggtcgttttacgaccttcagtgtaactagggttggtgacacgagcattatgtttcccttcctgggtaagggtgagaatcatatcgcgctcaaattgcgcaaaagcactaaataaggtaaaaatgagtcgtccggaaggggtgtcttcaatgatgcccatgttcaaaatatgaattttaatgcgggctttaaaaagttcttggatgatttcaagtgcttctttggtatttcttgcgaagcgatcaagttgtgtaacaacgatggtatcaccacttgaaacccgatctaatagttcattaaatttggggcgatcaacggtagttccggtaaacttttcgctgtagataatgtcacagctttcttcctttaattgactaatctgggttgctagactttgtccggcagatgaaacgcgtgcgtatccgaacttcattgcacaattctcattatttctacttataataataattatacagcatttgaacttgttttatattaaaaatgcatttttaaatcaaattttttacgaacattcataaaaagattgctacttttcagaaaattatttagaatagaactactaactttttaacacaagagggataaaatgacacaacggtatcgcgtaacaattgcctatgatggaacggattttgcgggtttccaagtgcaaccgaaccaacgaacagtacagggcacattagaaaaagcactgacaaagatgagtaagggtgcttatattcaagtgtatggttcagggcggacggacgcaggtgtccatgcaacggggcaggtggtccatttcgactatccaggtcaattacccgctattagtatgttacgggccttaaatagcctcttaccgcttgatatggaggttgtggatagtcagttagcggatgatgactttcatgcacgattttcaacggtcggtaaacggtatatgtatcgggtcgatcttgggcattatacgaatccattcaagcgacgttataccggtcattatccgtatccaatcgatgtggaacggattcaagcggcgctgccagatgtgatgggcacgcatgattatacgagttttgcggcttcaggtggggtcattaaggataaggtgcggacgatttatgatgcgaccgttgttttcaatgaacccgaaaatgaactcgtttttgagttttatgggaacggctttttgtataacatggtgcggatcttggtcggaactttattagaaattggtaacggtcggcgggatgtccacgattttttacggctgtatgaagttaaggaccgtcaacaagctcgctcaaccgcgccagcaagcggtttgtaccttaaaaaagtttattacgaaactgatgaaaataattgagattcaattgacttaatcgtaaaattacgatactatagtatctggtattgtttgccccacgataggccccggaaacttattgagtgtcaaacaaacacagaatattggaggaataaatcgtgcgtacaacttacatggctaaaccaggcgaagtagaacgtaaatggtatgtgatcgatgcaactgatattgcattaggtcgtctatcaactgtagtcgcttctatcttacgcggtaaaaataaaccaacatttacacctaacgttgatacaggtgataacatcatcgtcatcaacgctgaaaaaattaaattaacaggtcgcaaagcaaccgacaagttatatcatcaccatagtaaccatcctggtggtttgaaaactcggactgctggcgaaattcgtgaaaacaacccagaacgtttaattgaaatgtcagttaaagggatgttacctaagaactcattgggtcacaaccaattcttgaagttacacgtatacgctggtggcgaacacaaacaccaagcacaaaatccagaagtcttagacattacggacattatttaaggaggaaactatagtggctcaagtaacttataacggtacaggccgtcgtaaaaactcagtagctcgtgtacgtttagtaccaggtactggtaaaatcactatcaacaacaaagacgttgttgattacattccatttgctaacttgattttagatatgaaacaacctttaacaattactgaaacaacagatagctatgatatcttggtaaacgttaatggtggtggattctcaggccaagctggtgcaatccgtcacggtatttcacgtgccctattgacagttgaccctgacttccgtccagctcttaagagcgctggcatgttaacacgtgaccctcgtatgaaggaacgtaagaaaccaggtcttaagaaagctcgtaaagcttcacaattcagtaaacgttaatatcacttttatatcaatgtttacaagcacctcgcaattttatattgcggggtgtttttttgtttttgacaccatcggaatttttaagtgtaagcctaatgcgccatcccagcctattcccaatatttttgctatgcttagagtaattgaaggaggcttttttatgtatcgttatgccgttatttataatccccactctgggcacaacaatggtgagtcggttggtcagaaaattgagcaggcactcatcaagaatcaacacaaggtcgaactgatgccgacggaagggccgaaagatgcaacgcggttagctaaaaaagcggcgcgggcaggctttgatgtggtggtcgctgtcggcggggatgggaccattaatgaagtcgttagtggtcttgcgacgttagatcagctgccttatttaggcattgtacctgctgggaccgtgaataatttggcgcggatgttacaaatcccgttggacattgatcaagcgattgaaaatctgcagcaggttcatctgcgcccactcgacgtcggccaagtgaacgatgattacttgattagtacaatgacattgggcattttggcggacgccgcgttgaacgtgactcagagtgaaaaacaaaaatgggggccgctagcttttttaagcaaaggcatccatgcattagcggagcatcagcattatccgctaacgattgaaacgcctgatcggcactggcaaaaagacacgcaattcttgctggtgaccctcacgaattccgttggtggatttaccaacttcaatcccgaagcgcaacccgatgatggttatttccatgtcttcgttgctccgaaaatgtcgctagcacggtcagtgatgtttctcccttatttcttaacgggtaattttaaaaagattcccgggatgacttactttaaagcgaatgaaatcagcatcacagtcgacaatcagcaaagtgcacaaacccgcattgatggtgatccgagtgccaagtcaccattggagatgcgactcttagaacataagttgcaagtgattacgcctaatccggatttataagactaggggtaggttagagtcatcggtaaaacaaaaaagaattcaaaattttctaacgaaaattttgaattcttttttaattattgcgttaattcagcttgtttggccgcaacgcgttcactaatcttcaggaatggccagtagattagaacgccgaggattaaagtgaagccttgaatcacaggggcgcgccaatcgccgccggttgctaaatatgagttgagtaatggtggtgtggtccaaggtaccatgacgactactcgattcatccagccaattgcggtgaagaagtaggcaatactgatgccaagtcctggcattaggacaaatggaatgatgagcgcaaagttgaagacaattggataaccgaaaataacaggttcgttaatgttaaataaacttgggacgaatgatagctttgtaatatcacgactagcgcgtgattttgagaagagcaaggtcgcaatcaataaacaaatagtactaccggtaccaccaagcatcccaaatgtatcgcggaaaacgttgttgatgatataagggatgtgttgactagctgcgtaagctgccatatttttgttcatgttgattagtaagactggatccaataaagtaccgttaatgacagcttgatggatcccaaatgagaagaggagattaccagtcccgtaaatcagaaggagacccggtaaacttgtattaatgcgccgaagtggttcttgaatcacatttgtaattaaagtgatgagatcagtgtggaaaccagccgttaaaatcgcagcaagtgccgcaaatagactcatggtaatgagagctggaatcattgtgttgaaagaaccagcaacagctgatgggacggcatcactcaagttaatctgtaattttttaagctttgaaagagtcataaagagttctgttgcgactaaaccaataataatgccggcaaacattccggttgttcccacgttttggaaagttaagacgccagaaacttcgacggctttcttggcagctagtggtgtgaccggaacagtattaggcatcatgatgattaaagtccctagtgccatgacagccgcggaaattttgttgacgtaattcttattacgtgctaaacagtagccgattgtgggtgcgagtaatagcccagcaacgttcaaagtcccattggtaatgtaagtgccgaagtattgaaagttggttagcatttggccgtggaggacccaagggaatacaacgttattcacgagcaccccaattccggcgaggatgaatagtggcataataatcgcgaaggcatcacgtaatgaacgcaaatgcacttgattcccgattttaaaggcgatatttgtaaactgatcaataaatctttgtcgccgacttccttgtttaagcatagaaaacactccttttaacgcactttttttagtctaattgttcaccgttagattgaatgactttttgcagccaataaaaactagccttcggaattctagcaaggtctttgaggtcgtgattggttcgattgacataaacgacgccatagcgtttattcatatcaccttttgaacttgggatgtcgattaacccccaaccaagatagcccacaacgtgagcgccgtcttcatcaactgcgtctttcaaagcctggatatggtcgcggtgataggcaatccgttcgtcatcttgaatcatttcatgattcagcgattcttcgcgaatgccaatcccgttttcgatggggaagatggggaggccagtttcattcgaaagttttgttaagacgtttctaaaaccgagggcatcaatctgccagccccattcgctactttctaaataaggattagggacactcgcatcgcgcatgtaataattgggtggtgtgttgggtgttaattttgtgtgatcgagtgcgacagtgtagtagtaactgaacgctaagaagtcgttgtgatgacttgcaatgagcgctaaatcaccaggctgaatactgctcattaagtcatgattttgcatatattgcagtacttcggctgaatagtgaccttttgtaaaggcgtcaacgaaatgttggttgataaattctgatgcttttctagcagcaaagatatcttggggatgactggttgcaggatagaattcttgataggctaacatcccaccaatttggtcattagggtagtgggcgtgtaagtaattggcgatttcagcatgcgcaaccattgtattattagcgatcgtataaagggttaataagtcgcgctctccgttgataaagccagtattatcaaagccaggttcaaagaaaaaaccattttgttcattaaagcttagccaatatttgacttgtccaccataacggtcaatgacagccttagcgaacttagtgaatacttgtgtgacataccgacttgagaaaccattatatttttcagcaagatgcaaaggcatgtcaaaatggtacaggcaaatcatcggttcgatgcccgctttgagcaaagctgatatcaatcgatcataataatcgaatcccgctaaattaatttcaccatcaccatttgggaaaatgcgcgtccatgaaatttggaaacgatagcagttcatacccatctgttgcattaaatcgatatcttcttgataacggtggaattcatcaattcccactttccaatccgataaatcagctgtctcaggtttcacatcgtacactgataaacctttaccatcagcatcccaggcaccttcactttgcatacttgatacagaattaccccataaaaaatgtttgtctaacgtcatcatggtacctccatcacttgaatgattttatgatagcgcttttaatgtaacttgtaaagtcatattttataatttgaacaacgaatattccgaatctgaatatgctataataaccatatcaaatggtaggtggttactatggcaaagtataaggatattgcggcaacgattcgcacccgaattttagaaggacaatattcagctgatggtccgcttcctgaacagaagaagttagcccaagaattcgaaacatcaagaatgaccattcaaaaagcactcgaaatgctaacttatgaagggctcatttatagtgaacaagggcgcggtacgtttatcaaatcaaacgtctccgcgctatcacaattagatgcgactgtgaatcaatatgtagggacgactaagctgtttgccggaaaggccacagtaaagagtgacattctaaagaatgaattgcgattaccggatgcagaagaacaagaaaagcttcagttagctaaaacagaagcggtctatgacgttgttcgactccggtttttaaacgaagtaccctatagtattgagcattcgatcatgccggctaagattttaggggaattaacagacgcagtacttaagaagtcgatctacgaatacttggaacaaacattgcatctaaagattggcgtggcttaccggcgaattagtgccgatcaaccgaatcaaatggatcaagaatacctgcactgcaaaccagtcgaacctgtcttacaagttacccagacagtctttctacaaaacgggctgccttttgaatactcaaccacacgacatcgatatgatatggggagtattacaaccattacacaagggaatcattaataaaatgacctcactcagttaatgagtgaggctttttttgttgcattgatttgaagttgttgacaaaaattcacatcaatggtttaatggtttaaacttatgaaccattaaaataaaaccggagattaatgtatggatgaaatgaaggttattaaacagagctttgctgagctgagcccgtttttgacggcgcttggggatgagaagcggcagagtattattttagaattgatggctgataaagcttgtgatggcttacaggtcacggatttaatggcggcgtcggacttgtcgcgcccggcagtgtcgcatcatttgaaagtgttgaaggaagccaacttggtcgactttagacgcgaaggcacgaagaactattattacttgcaacacgaactgggcgaaatcaatcaactaaaaacactgctggatcagattacggcagtcatcgaaaaacaacagtaaaaggagtttttaaaatgcaaaccatcttaggtagtagcggtcagattggccaagagttagccaaggcacttcataaggacttcacaacggacattcgactggtcagtcggaatccaaaaaaagtgaacgcgaacgatcaactatttccagcaaacttgctcgacgccgcccaaactgatcgtgcggttgcaggcagtgaaattgtttattttaccgctggcttaccgatgaattcagacatgtgggaagcacaatttcacattatgatgactaacgtgattaacgcgtgcgtcgcgcacaaggccaagctcgtctttttcgataatacctatatgtatgcgaaaaatagcacgctccagacagaagcgagtccttttgaacccgttggccgcaaagcggttgtccgagcggagatcgcacagttgttacttgataagatggcaactggcgcaattgaagcggtcatttgtcgtgcatctgaattttatggcccaggcaagacgcaaagcattacgaacacaatggtctttaacaatatcaaggcgggcaaaaaggtgcgcgtgccattgaatgatcaagcggttcggacattaatttggacgccagatgctagtcgtgcgatggcgttgattggcaatacgctggatgcgtttggtcaaacgtggcacctcccttgtgatgacggtaaaacatacgccgaaatcatcgcgctagcaggcaccttaacgcatcaaccaatcgactacaccgttttaaaaatgtggcagttcaacatcggtagctggttcagcaaaccgctaaaggaattaaaagaactcctacctagatatgaagaagataacctgttcagttcagacaagtttaagaaacggttcccagaatttaaggtgacgacgattgaagaaggggttcaggagattctttaaaaagtcagcctttcgctcgatagactaactgttgttcaatattatataatcgctttaaagtagcgatgttagtcaatcagataaggagcgtggcatgatgaagaaaccttttaataagcaacaagtgaatggtgaaccaaatccggaatttgattccttctttgcggaagtcttaaagaagttgccgcaacaatcggcagctgtgattgcgaagtcttttaaccaatccaaagcattggcggaaaagacgatggcgaagagtcggacacagtttgatggggtctttgaagacttcctagtcggtgtggatgatcagatgcgtaaaaaggcacacaatatcattcacgcagcatcactaacagcagcgattattggctgttcaccaattccattttccgatgcgttcttgttggtgccggttcaattaacgatgatggcgcgtttgcataaactattcggtcaatcttggtcggctagtttgggcaagagcctgtcgaaagaattggtactcgttggcctaggtcggagtgcagtcggtaacattctaaaactggtaccggtcgttggaacggtcaccggagccgcggtcaatgcgaccgttgcgatgtcgattaccgaagcgctcggctggttaacggtcaagatgttgaacgacggcgaagacatcttcaatgatgttgtttcatttaaaaatcaattcagaacgctatttggattgttacgacgtaagtagttatttttcaattgacagaataagaacaaaacgatttaataaacccacatcactaatttttaggaggctaaccaggtgcccaaagtactaattgtccacacgaatgttacgcgttatcaaggaaccaccgatccaaccggattatggctgggggaatccgcagagttcgttgatgaattgcaaaaagcggggattgattacgattttgtcagccctaaaggcggctttgtcccgcttgatccacgggggatgaagtacacggatgaatcaattctgaccatctatgaacaaccggattacgtgcaacgagggttagtcgcaacgctgaagccaagcgatatcaatccagctgactacgctgcgatttactatacgggcggccatggcgtgatgtgggattttcctgataatccagaattacaaacaattgcccgggaaatttataatcacggtggctatcttgcgtccgtttgtcacgggatcgcgggtttactacgcattaaaaatgatgacggtcagtatctgattgctggtaaaaaagtgactgggtttaccactgcagaagaaattattgcgggcaagaaaaaagtggtgctatttttaaaccaagaagtggcaactcaaaacggcgcgcaatttgtgcaaaaacggttttacaaaccatttgctgtccaggatggtcagttgattacggggcaaaacccgttttctgtacgagaagtgacgaagcgcttgattccggccctacaaaataacggttaggcattctttgaattctatgctaatcttatagaatgtagaaaagttaggagtcagaagatgagtgaaaaacaaacaccaaaattaacgcaaaaagaaaaaatgcaagcactaattgatcagaaaaaaggtggcggcagatcaaaacagaccgacgttgctaaaaatgatcggacaaagatgcgcaaagggccaaagatttttaacgaaatccactggtaaagagtgcgtttggttgcggttagcaactgagcattaagctaaaatccgcagtaatccaggttttaggagtactgcggattttagcttaagcggaagttgttgcaaccaaaaagcacgtttcaaacaaagtgcgtttgaaacggtttggttctgagcattaacctaaaaataagcactatggcggtccttgccatagtgcttattttgtagttaagcacaggagccagtttcaaaaagcacgttttagggctagggcaattttgcgctagccctttttgtgttaacgcgctatgctagaagcaacttattttaaatcgaatggagtctttgtatgtcatctttaatcgaacaaatgcaacaccatgtttcagttcgtgatttcgagccaacacccctcagcacgacagtgaaacaacaactcattggggcagctcaaagtgggtcttcttcgaatttcgttcagccattttcaatcattgaagtgaccgatcccgtaattcgtgatgaaatcgcaacgatttctcaaagtgcggcgtatgttaaacagacggggacgttctatgtttttgtcgcggacttataccgacaagccacactcttagaaaaagcgggccagtcagtagctggcattcaaaatatggaagccttattagtcgcaacggtcgacacagccattgcagcagaggacatggcagtcgctgccgaatcgttagacttaggcatctgttatatcggtgggattcgcaatgacattgcgcgtgtcgctgaactactcgagttgcccgcctataccgtcccactatttgggttaacggtcgggattccgaagactaaaaatcaggttaaaccacgattgccgcaagttaatcaagtcgctcaaaatcaatatgatgtgcatcaggcaaccaacctagtgcaatacgatcaacaaatgcaaaattattatgctaatcgtgggaccaatcagcaacaaactgattggtcgaccaagaatacggccttctttagtgaagtgcgacgaccagcagtggcgagttttttgaaaaaacagggctttacgttgaattaagaaaaaatggtacttatcttaaaggacaatcagttttctgattgtctttttttgtgtcgtgcaagctcggatatgcgataataaaactagtcaaatgtaaccggttaaataggtataggagtgatcgttatgagtttaattgatgtacgacatgtagccaagcggtatcagatgggcgagacaacaatcgtggccaatcatgatattagttttacagtcaatgaaggggagttagcggtgattctcggaccgagtggtgcgggaaaatcgacagtgctgaacatcttaggcgggatggatacacccgatgaagggcaagtgttgattgatggtgtcgatattgcgcagtttagtgcgcgccaattgacggcgtttcgccggactgatgtcgggtttgtgttccaattttacaatttagtgccgaatttaacgacgcaagaaaatgtggcgctggcaacggctgtctcgccgaatgccttagatgttgcgcttgttttgcaacaagttggtctgcaggatcggcttcagaattttccggcccaactatccggtggggagcaacaacgggtggcgattgcgcgggcgcttgctaagaatccgaagctcctcttgtgtgatgaaccaactggcgcactcgattatgaaacgggtaagcagattcttaaattattacaagaagttagtcggcaacaacaccggaccgttgttttgattacgcacaatgccgcgattgcccagatggctgatcgcgtgattcacattaacgatgcgcgcgtgcgttcaattgaagtgaatcccaacccacttccagttgaaaagattgaatggtaggtggttaatatgcagacacgtttatatttacaaaccacattccgcgatattcggcaggcgattggacggttcattgcgattatcctgattattttaatgggtgtcttattgtttgtggggattaaatcgattggcccgaacttagaagagactgtggatcattttgtcaccacgcaacgcgtatccgatttacagattagtgggaccgctggcttaacggaacaggaccgtgcggtggtcgaaaaaatgcatggtgtccaagctgaattgggttatcggattccgtatcgcgatgaagcgcgggatgttaacttacaattatataattaccaaccaactgcacggcaaaatcgcttaacgctgactaccgggcgctatccgcaacgaacgaatgaaattttagtggataacgcggttaagacgcattatcgtctggggcagagggtgacggttaagagtcagcagctattgacgcaccggtttaaagtggtcggttatgtggactcaccgctatatatcgaccgtcaggaacgtggaaccgtaccggtcggggatggtcagctagatggctttatgtatttgccacaaaaggcatttgcacctcaaccgtattcggtgatgatggtgcgctttagtgatttggatcgtcacagtagctttttacaggcttatcgcaccggcattgcgactaaagaaacacagctcatgcgccaattaaaagcacacacaactcagccgcagcaacagtacttattaactgcgcgcagtgctaatccgggttttaatgaatttacgagcttgtcggatcgcatcgatgcgatagggaatgtctttccggtcttctttttcttaatcgggattctaattacctttacaaccattacgcggatgatcgaagaaaatcgtaaggaaatcgggacattgaaggcactaggctatcgtaattgggaaattgcgcagaagtatttactatatgcgctactaacaggtagtatcggcaccgtgcttggcaccattttgggcacgaagttattaccgctagtcgtctatcgaatccaaaaaccggtctacacctttgcgcattatccaacccatttttggacagttccaattttattagccactggagcggtcttgattgcgacagttggggccacggggtatgttttaatccgcgatttacgcgagaagcccacccaattactccgaccaaaagcgccgaaaccaggccaacggatttggttagaaagaatcacaccgctctggcggcgattgagtttccatcaaaaagtaacttatcgtaatctttttcgctataaagcacggatgattctgaccatcttaggcatcgctgggtgtaccggtttaatggttgcaggctttggtttaaagacgtcaattggcgaagttgctgaccgtcagtttaagcaattgacccattaccaagcaattgtgacgcttaaaataccgaatagtacagcccaaacgaagtcgattttaacacagactgagaaggttcggtcttacttaccggtcacaatgacccaggctaagttcaagcaaaaagggattacggatcaagcggcgacagtctatgcggtcgctgatcaagcaaaaattgcacagtacgtcgctttgcaaacaccgcgagaacaacaacgactcacattgccgaaacacggtgcgattattgctgcgaacctcgctaaaacatatgctgtccaaaaaggcgattggttaacgttgcaaacggcacaaggtcagcgtgcacgaattcaggttgcgggtatcagtgaaaactaccttggtaacagcgtctatctccgccaatctgctctttcaaaaacgctacaacaaccagttgcggctaatgcctatctcgtgcgcaccgctaagatgactaccaagcaagaaaaacagttggcgacccgtttgcaacaaacaacggaagtggcggccacaacgtttatcagtgatcaaggggctaagcaagcaacggctagtgctaatttagacccaatcgtttttattttcatcgggttatcagcggttttagcgtttgtcgtcttattcaaccttactagcatcaacgtttcagagcgggaacgtgaattggcaacaattaaagtcctgggctttttcgacaaagaagtgacggcctatattgtgcgagaaaatgtaatcttcaccgttgttgggattgtgcttggctttggaatcggtaaattgctgacttggttcatcatcacgatggcctcgtcagaacaagtggcctttccactcatcattccagctagcggctacctgattgcggcagggatgacggtgctattttcactgattgtgatggggatgacccatcgcaagttaaaagggattgatatgattggtgcattaaaggagaacgaataaaagttttagcaaataatgcttttttacttgcttgtgacgttacgtcatcggctagtatcaaggcatggaggtgatattctatggcgcaatatacaacaggtgaactcgctaaattatgtaatgtttcggtgcggacggtgcaatactacgatcaggccgatttgttgaagccggcaagcttaactgaaaatggacgacggctgtatggggatgcgcaagtgcagacgttaaaagtcattctaggctacaagcagctaggcttttcactgaaggcaattcaaaaagtgatggcgagtcaagcttcgacggatacactggcattgttagtcgaacaacaactcaatcagttagtccaaaaagaaacagacttagctaaccagaaagcagcgttgcagtttgtactgcaatcgattcaaaatactagcgcggtgccttttgaaatgacaatcagcgacatagaagacgcaatggctaaaacaacacagttaaaaagattacatcggcgaatgctgatgtggggcttattgattgatggtgtggaaattggcttattaattcttgggtttctaagtggaatttggtggccaatgtggattgggataccggtcatcattgcgatggccatttatgtgacaacattctactatcaagaaactgtctatctatgtcccaattgcaagacggtcttcaaaccacgcctaagtaaaatgttctttgcccggcacacgccaaagacaagacaactagtgtgtccaagctgtggacacaaaaattactgcatagaacagagtgcgtaagcaggcgttcgtatttttaggattaactggatttgccgaattggccacgcaatcgctaatttggcaaatttggttagccacagaaatatgcctgctgaagcacgtttaagaacagagtgcgtttggtcgcggttagcaaatgagcgttaagacaaaatcaccagtaatccgtttttggagttactggtgattttagcttaagcggaagttgttgcgaccaaaaagcacgtttgaaccaggtgtgcgcatcaaacccaaaaccatctaagctgggacgatttcgtctcagtttttttgagtcagatactttataatagaagtattacaaaaataaggaatgatgcaaatggaaacgacagtgatcatctcgacgctctttcggttggcaaaagtcttcgatgacatgggtaagttattgttcaaagcgcatttagatgtgccgttgacgtttgaccgtgcgcaatcgcaggccttattacggcgcaataaccgactagaattcagctatcaacaacttaaaacaagtaaaataaaactattaaatcaattattggcgacggcgggagccgatccctatttgtgggccaagttacggcgactgcaggcattggatgtggcgagtttggcagccgttcaagcaaatccgcaatttaaccgccaacgcaagattaatcgtttgaaacaactgattatcaatttacaaaatgaaaaaatcaatgagagtacggtactgacgaagcaggcgctcgcctatttataccatatagcccctgataaagtggcggccacgagtaagccaggaccgatactggccgatccatttgatagccgcgcttttaaaatggacatgatggctcttaattatttagatcagtattttaacgtgcaggaattgcaatattacgtgaagtacctcgtgtttattcacgcgcatcaagcggcggaagcggtgattcactatgatgcgcgaacggttttgccgaatgcggaacaaactggtttttcggcagttgcctattacgtcacgcttaatcgccaatcgtatacctacatttcctacaaggggactgaggggacgatggatgatccgcggattaagtcgtttacgcagcggctggataattatgtccgtgagagttatcaagattggaagtataatattgatgcgatgctgattggcaataccgaaaatgatgagcaactccaactcgcacggcggtttacgcggtatgtggtccggcgggtgcgccgaattaatccggcaacaatcatctatggactgggtcactcactcggggggcattttgtgcagacggtccaattattggatgaaccgtttgatggtggctataccttgaatgctgccccggttcagttaaaacaaataaagcattatcggccggatcttttatccgcttcaaaatggcaacaattattcgcattgactaagcacaacaatacgcaagatccagctgtagcgatgcaagtccacgcgattttggggcacaattacgctacaattgaaaatgaatggttcattaaagatttaacgcggatctattttggctttccgtatacgttctacattgggacggcgcgctatttgaatgctaaaaattggcattacccgtttgtgactgacgtagcaccatatctccgaaaagatgagattcaggcgtatagccagttctggggtaatctaattcgctatttgaaacgtgttgagactagaaatgggtcgttgatgttggcaagtctgatgacatatggactgcagacactccgtgaagtgtatgccgcgattaaaacggaacaggcccaacagatttttgcggcatatgcgcgctatttatacgatgcgcatatttttaaagacacccccgttcaggtacaggccaattttgaacgggaattatcacggccgcgcacggcactccgtgtgttacaaggcgaatggccatttttaaaaagcgtcaacaatgagatggtcgaaacggtgattttcttccacacgattgaaggcgctcaatactttacacgctagacagatgggatgttaactaatggatatttatttgaaacaagcaattttacaagtggtcgaccgcgaactcggcgatccaatttactcacaacaggtgctagatctcaccaatgggaacacacgcgactatttaaccaacaagattaagaaattatcgtctgcccagagtaagaccggcgtgctacgccaagatgctgagctcgcatcttttctgcgcgatgcgacagctgattttatcggcgctagccaacgcctcgttgaaaaatggtacacggtctatcagaaaagtgacgatgcaccgagtgcggatgcgtttgttgtcttgtatgaacaagatgcccaagcttacttggcttttttgaaggtcgattatcatcaagccttcacccattatgtcaatgctgaagaggggccattgatgaatcaactgatcattcaccaatcgattctatcgaataagacccaaaaggcggatgaggggttcgcgattaacctccagacgtttggcttcgaattgatggagaagaagtacaccttctccggtgaaaagatgacctatttatcaacgaacgtgattgaaagcgaaccagcgccatcgctagaagaaaacgtcaaggtcgttaaaaaggccgctgaaaaaatcggcaagaagttcgaagttgccaaacacgatgtggtcgccaacgtcaaagaagccatctacgatacaatcgaaaccaatggtgaaatcgacacgagccagatggcagcgaagatttttaaagacaacgtttcagcccaaagtgagtttaaagcagaaatgacggaaaacgcgccagcagtaccagcgccaatctcaccagccgtccgcgaaatcgccgaaaagaaatacggcaaacaaaaactcaaactctcaaacggcatcgaactaatcgtcccaatcgacgtctaccaaaacccaaatctatttgaattcatcaaccacccagacggcacaatgtcggtggagattaagaatgtagaagaagtgattagtagattatagagtgcgtaggcaagcggttatattttgagcattaactggatttgcccaattggcgatgtaatcgccgattgggtgaatttggttaagtacagaaatatgcttgccgaagcacgtttagagtgcgtttgaagcgggtcgactttgaggattaacctaaaaatgtgacttatgacgggtttggtcataagtcacattttgtagttaaccggaaaagccagtttcgaaaagcacaccaaaaaagagcatttctctcatcctatcgagaaaaacgctcttttactatgcctttctttttgcccagattaaacggataatcttatcgaattccgtgatgattagaatcaagaagcctgcgccgatcgaaacgccccattctaataaggtaagcggttcggtgtagaaggtttgttgcatgaatggcacgtaggtcaggatcaattggagaataatcatcagtgcgataatgccgaatgccttttggttggtgaagaaagcttttgaaaaggcgagtttcgcagtccgaatattgaacaagtagaaaatcttgctgatgacaatgatattgaccatcattgtgctggctgtgacttgatcgacaccgcggccgagtaaccaatcgtaggctaacaagccgattaaggccatcaagacggaaacatatgccatttggaaaacatcgtgtttattcatcagcgcttggccggtcttacgtggcttgcgggtcattaagccatcttcagctggttcgaagatgaaggcgaattgaatcgtaatcgccgagaccatgttaatccagagtaactgcgtcgcttgcaacggcatatcttgttgcatcaaaatcgtgaaggcgatgattaagccttccgcgaaggaagtcgggagtaagaagagaatactctttttgatgttatcgtaaatccggcggccttcacgaattgcgacggacattgttgcgaagttatcgttggttaaaatcatatccgcggaatctttggcaacatcggttcctttaattcccatggcaaccccgatgtcagcgcgcttcaatgcgggcgcatcattgacaccgtcaccggtcattgcggtgactttgcgactggcttgtaaggcttcgacaatttcgagtttgttatgtggtgtggtgcgggcaaagacttggtgttctaaagcggcttttggtttttcagcgtccgacaagcgatcccattccggcccggtaatcgcattaatcgttggtgctaagcctaacttttcaccaattgctttagccgtcagtggatggtcaccggtaatcatcttgacatcgaccccagcagcgttcatttcggcgagcgcttggatgacttcatcgcgtggcggatcgataatcccggcaacccctaagagttgaatcccttgttggagttgttcatgggtaattgtagcagtcgttgttggcacgtcgagataaccgaccgccacaacccgtttgccttgttctgataaacgggtcacatcggcattccagtcatcgattgggaaatcgaccattgcctgttgggccattgggaataatttatctggagaccctttgatatagattcggtgcgtaccatcagttagttgcacgagtttagcaatgtagcggtaatccgaatcgaaaggtaacatgtcaatttctgtatttgttggtaagtcgtcgataccatgaaccttatgatataaggttaaaaaggcaccgtcagttggttcaccgttaatggtccaaccattgtcggcttgataaagcgtcgtatcgttggcttcataactagcctctaagaattgtgtgagggtggtatccaattcagcaggttggttatttaataaaatctgaccttcgggcgcatagccattcccgctgacttggtaagtcgtttcggcggtgataatttcggtcacggtcatttcgtttttagttagcgtccccgttttgtcggtcgcaatcacgtcgacggagcccaacgtttcaacggcaggtaagctcttgacgatggcgtgtttgtgcttggccatgtcgctgacccccattgcgaggattacggacattgttgcgggtaatccttcaggaattgaaccgaccaccatcgtgacaatcgcgattgctaatactgagagtgagtaatgttcgccaagtaagccgaagaggaataaaaagacggccgcaccgatgacgacaaatgaaacgccggtccctaagccgttgatttcgcgagtcaatggggttgggcgggttttcgtttcggtgacagcaactgagatttgcccgatttcggtatcagcggcggttgcgacgaccacgcctaagccgctcccgttagtgacggaagtggaggcaaaggccatgttgacttgatcggcaagggcaacttcttcttcggttaagcgtgttgcaattttttcaactgagtctgcttccccggttaaggctgattcttgaatacgcagattatcggcatcaacgattcgtaaatccgctggtacactatcgccagcttctaggaagataacgtcgccgaccactaagtcttcagttgggatgtcgatccgctgaccgtcacgataaacggttgcttcggttgccaacatttctttgattcgttccaaagcatcagatgcgttcgcttcttgataataaccaatgatggcattaatgatgactactagaccgatgatgatggcatccgaatagtgacccatcatgagtgttaatagggctgcgacgattaggatgtagatgattaagttgttgaattggcgcacgaaaagttgccacttcggggtgtgatggctctcgagtttattcggaccattggttgctaagcggttagccgcttctgtttgcgaaagcccctgttcaaaatcttggtgggcataattggtttgcagttcgtctaatgtttgttgataagcgtgtgttttagtcatggtaagctccttttaattatcgaaagtcaaaatgcggtcgttcgtgatcgttattcttgccgataataaggaataatctgatggattaaacaaaacgcttcgtccgagccgtcatccaaaaatactcacctccagttagttattactctaaaattatcaggaaaaagtagcgatgtcaatctaatgaacactattaccaattcaacgtttaaactttgcgcccagtgcggctttgtggtaatattattacataagttaaaaaaacggttgaagcattgcgcgttcaagatttccttctttagggtggtagaagggaattttggcgtgctttttttatggagggaaatgaatcaatggcaactttagcaattattttaatcagtactttattggcaggacacatgagcaaacggattggaatgccagctgtgattgggcaactcctggtagggattattcttggacccgcgttgttcggtgtcttacatgaaaattcttttatccacacgttttccgaaattggtgtcgtattattgatgttcatcgctggcttggagagtaacctgaccttgttgaagaagtatttcaaaccaagtttagtggtcgccgtcttaggggtgattgtcccggtaatcagtatgtatgggatgagcttggcctttggcattagtcagctcgagagtttattcatcggggtgatttttgcagccacctcagtatcgatttcagtcgaagttttacgtgaattaaacgtgttagaaagtaaagaagggacgattatactaggtgctgcggtagtggatgacttactggccgtaattatcttgagtgtcttgaccagtctttttggggcgcaactggctgcagctagttcaacccacatgagtttagggttgagtttattgctgcaagctttattcatggttgcggtctactttagtgtgaaatggattgtgccatttgttatgcatttgagtcgtcgtttgttagtaccatatgcgagcgccattacatcgttaatcatttgttttggatttgtttggttcgctgaggccgttgaattgagtgcggtagtgggcgcgtttttcgcagggattgcgatttcgcaaaccccgtataagaaagaaattaatcgccatattgaaccgatcgggtataccgtgtttattccggtattctttgtcagcatcggtttatcgatgaacttagcaagcttgaatcaacatattctatttattacgattttaaccgtgttagctgttttctcgaagttaattggaagtggtctcggtgcgcgttggatgaataattcgccacaaggagcctatacaattggtgcggcaatgatttcgcggggcgagatggcgttaattatcgcgcagattgggtacaacgctaaattgttgagtgaactttattactcagagattattttcgtgattatcattaccactgttttggcaccgctgattcttaaacacgcagtgaaacgccaattagcaactgaaatcaattaagaaaaatcgtcagctatttgctggcgattttttttgcccttttttaaagttgacaaaaaaaggattgagcagtacacttatcacgttaagaaaaacatgtatttaattacattatatgaaggcttttaaaaggacaaaacaatttaaagaattagaagatttcttagggacgcatttcatttacacttacgataatggttgggagtatgaatggtatgcaaagaacgaccacacagttgactaccgaattcatggtgggatggttgcaggtcgttgggttcgtgatcaagaagcaaacatcgttaagttaacggacggcgtcttcaagattacttggacagaaccaactgggactgatgttgcgttggacttcatgccaaacgaaaacaagttacacggcatgattttcttccctaaatgggttgaagaacatccagaaatcacagtgacctaccaaaatgatcacattgcactcatggaagaatcacgtgaaaaatatgaaacatatcctaagatgttagtgcctgaatttgccacaattacttatatgggtgatgcaggacaaaataacgaagacgtaattagcgaagcaccttatgaaggtatgattgaagatattcaagaaggccggtatttcgatgctgactatcgcaagattcaaaaataggcaagctgcttaactaatcataaatatttactaattatgacaataagtaaatagttgattttataaagcggtttcgttataatgaggtcatggttaaataaattaacgaggtgaactggacatggcgattcaagtaggtgatttagttcgcggccaatcaaacgaaattatgtctgcgacgtatatcggtaaggtcattgagaaatgtgaagaaactgtgcatatcttaatcttgaactatgcaccaactgatcgttttacggttcacgagttgatgcaacgaattctagtgaattcacaacaacttcgtgcaatttcgttaacgaaataactccctaataaccatagatttctccctataaaaaaacgaccactcccaagaaaaggtcgttttttttatgcgcaaaaagcggtctaatcacaaaggtggcgattgcatcttgttgctcgctcacttatagtgaaagataagtgatggcaggaggaatgtgcagtggttgaaaaaagaaagttaattgaaacagatgaaccagcattttatgaattagcacaatatgcgtttaataaaccggatagtgctaagcgccaagaattcttcaaacagttgtatacacatagtgcagggtttggcgtttttgatgacggccggttggcaagtggcttattagcgacgccgtttgacgtacggctcaatgggcaaacctttaagatgagtggcattggttatgtcgcgagttaccccgagtttgcgggcaaaggtgggattgcagcattgatgcaactcacgtttgaacacatgcgtgcagaaggtgtgacgctttcgtatctcgcgccattttcatacggcttctatcgtcggtttggctatgaacaaacttttgatcagacgcactttgagattcaaacggctgacttaccacgattgaaatttgcaccgagtgcaggacaagtagtacggatgacattggcgcaagcggtgccgttgattgatgcgttcttcaatcagcatccggacaatcaagtcggtggtgtgcagcggactgattggtggtggcaatatgatgttatgaagcatagtgattgggaagtggcggtctatcgagaagatacaggacgggttgcggggtatatgatttatacgcgccaaccagagacgtttgtgattcaagaactgatgacctcgacagttgcaagtcaagaacagctattgagctttattcttaagcatcagtcagcttatgcgacaattcagtatgagagtgcactgactgagtcgctagctgatttattgcctgatcccacaatcgtaaagacgacaaccgtcccttatatgatggcacggattgtgtcactagctgatttcttcgcgcgttatgcctatcaagtagcggaactatctgcggtaacgattgcggttcaagatgatttcttacctgaaaatgccggtttatggcagttaagtattcatgcaggacaagctgctgtgacaaaattagcaacggggaccgcagacatcaccgttacgattcaaaatctaactaaggcgatgttggggtatcgcacacttgagagtcaagcacactttgggcatgtgcaagggacaccgcagcaaatcgctcaactcagtgctgcgtttagtcatacgaaaccgatgttatgggattatttctaaattgaacatcaaaaaaagccaatcatccaggtaatatctgaatggttggctttttttaattaagcaggttggacaatctgcacgttggcatttaagacaccggcagaggggatgtcacaatttggcattgcgacgtctaattgttgtgagttagaagcggcgaaggttccggtatcgttgacaacacggtaccatacttcaccggtacttaatgtgatcttgatttgtgagccgcgggggataacgcccaagtgcgcagcgactccggcgtacattccaccgggcatacttgttgcgccaaggaccgcgggatcgtaaaaggttaatttgaatgtccctttgtcaattaaggttggttcggcaggtgctggggccgcaactggttctggctcaggggtgggcgttggttccttaatttctgcggaatcaggatctggatgaatcggacagctaacgggtttgtctgttggtagaacagttgcgtgtttgaccagtgacgtttcagctgcttgggcaggttgccccgtgaattgttcaatggctttagatgacatcagcttttggacagggtggttcgtttctggtgctgcttcattggttaatgcggcacgcgcaatattcgttgtaattagcatcagcaatataaggccgatagctaacaagaatggtttgtttttgataataaagcgtcactcctaggtaagttttggaactaggagagtatatcaatgctgcatgtcaattaaatagcagtttctttacagaaatggggtaatttgtcatgttagtcatatgtttgtaaaatttaggagcttaattaaagggcgtcacgatggcgttgagcggcagtaagacgcgaatgggaatgctatcatgacgattactgttaaaatgacaaaaaacagggcaactatcgtaaagatagttgccctgtttttaagaattagatgagaaaatagccgaatacccctaaaatgattaagaataagaagttcatgccagtgaaaacgacgaggaacttaccaaggtctttaccccagcctttcttgaatcgtttgtaagcaatcaagtttgcaagtgaggcgaacattgtgccgaccccaccgatattgatggctaagaacattgcgtggctgtggttggtgaagcttgaaagtaaaatttcagttgggacatttgcaattaattgacaactgataatcccggtgatgtaggtttgttttgctgttccgacaattgatcgcatgaatgtggcaatcgttgggatgtgacttaaattcccaacagcgatgaagaaacagaagaatgtgagtaataagccgtaatcgactgttttgaataacttaggatcaaacgctagaatcgcgataatcactagaattggtgtcacccataatggaattaatgagaacactgcgaggaaaacgacaaccgttaatggaacgaaataccacagtggccctttttcaacttcaacgggatgtaacccgtgaagtttgatgggttcttttgggaagaggaaggtcgttgctgccaacataatgacgctgacaatcaagacgggaattgaatattcgaagaaatggcgaatcgtcatatggtaaaacgaaacaagaaaaatattatgcgggctcccaaacggtgttaatgaagaaccgaggttagccgaaatcgtgatgagcgtcaccggtaagattggtgaaaattcaagttgacgcgcaattaagatgaataatgggacgaacgttaataccgtcatatcgttggttaagaacatcgcgccgacaaacgttagtgctaataacatctgcatcaaggctcgtttggaacggcttttgataattaattcgcgagcgaagtaatcaagcacgtggagccgttgataaacttgaacgagcgtcataatacaaaagacgctgacgatcacgtggaaattaacgtaactaagttgtgggcggttgaaaaatgaggtgacaatggctgcgatggcagcggctaagagtagtttgtcatctaagaaaaaatctcggatgttcaaagcaatgtttttcatatagattcaattatccttcttaatatagttatattattcaaaaaagcactactacaattctagactgtttacggggataaaaacagaaaaatttacaatatatacacaatttttacaatacatagcctcccattctagtaaacgtggttgactgtctcgcttgacgttagcggtttttaatttgaagaattaagtgattttactgcttatcgcggctaaaattaggtataatataaatgaaatgtaaacgattaatcattattaagaaggtggagcagatgaaagacgccccaagacatacaatcatattaggaatagtggccacggtcattgcgtttatttgtggcatgttagttttaaagacgattttgaatttcaatttatggcttgcgattctaatcagtgcagtactaggcttatatgtcgggtttaatgcattctatagtacgtatttagcagaaatgatcaaaattgaagtggctaatcaaggattaacaagccaagacttagcgacaatgatgcatggtagggctaaggattatccaattgtccgcggtgaattgcgtctaatcatttctcggcgcaaacgcgcacagctgttagcgaagttgcgtgcacgggttagctaaggcttttgcatgaacgattgttctatgttaggataggactaacttattgaagggtgcgattacatgttaattgaacgaccattaattatgaagcttcgctctgtatatttgaagatgacgcatcgtgcagagcctaatattgattaaaagtcatctataggacattactggatttaacgactggtgacagtggtttatttgggtagtgactatggatggagtggtcgatagtcaatgattgtaatcatgacaggggtagcggatgctgcccctgttttttatttggaaagaaagtaggaataaaacaatgagtattttaaaagtcgaaggcctaacacaacagtttttagataaacaactttatgacgacgccgggtttcaagtgaataaaggcgaacatatggggattaccggccaaaacggggtgggtaagagtacgttaatcaatatcctcacgggcgtcattcttccggatgaaggaaaagtgacgtggcaaaagaatttgaagattggttatctcgatcagtatgcgaagttagcaccaggattatcgatctttgaatttttgaagacggcttttgcggatttatataagaaagaaaaattaatgagtcaatattatgcggactatgcagagagccttgatgaccaattgctcgaaaaagcgggtgcgattcaagaactattagaggcaaaaagcttctatgatattgatacgcgcgttatgcaagtggccactggcttggggattgatgcattagggatggaccatgatgtatcacaactaagtggggggcaacgttcgaagattattttagcgaaactactattagaagaacccgatatgttattactggatgaaccaacgaactatttggacacgaaccacattgattggctgagtgattatctcaatcatttcgaaggcgcctttatcacaatctcccatgattatgactttttggaacgggtgacaacctgtatcgccgatatcgaattcggtaagattacgaagtataccggcacactacaacaagccttccggcaaaaggaagagaataaggctagttatttaaaggcctatgagaaccaacaaaagaagattgaaaaaacgaaagcttatatccgcaagtataaagcgggctcccgttcgacaattgccaagagtcgtgagaaacaattggcacatatggatattttgacgccaccaagtaatcgcgtgaaggctaacttccactttccatatcatgcaacggccagtcagattctattgacgactaatgatttggagattggttacgatcgcgcgttactaccagcgttgaacttttcaattggtcgtgatcagaaggtggtcttgaaaggttttaatgggattgggaaatcaacgttgattaaaacgatcattaaagaaattccagcaatcgatggggactttgagattgccagtacggtgaagtttggttactttaaacaagacttgaagtggccgaataatatggtaacgccattacagtatctacaaggcgaataccctgatcagaaacaaaaggaactacgccaagttttatcgcggactggtttaactgccgaagaagcgatgaagcctttgaaacaacttagtggtggcgaacaatcgaaggtgaagattgccgaactactattaacatcaagcaactttcttctattagatgaaccaacgaaccatttagatgatgatacgaagaatgcactacgaaaagcaatccaagccttcgagggtggcgtactccttgttactcatgaagaagacttctatcaaggtgactggattgataagattttggatgttgaatcactcattaaacaatagggataccgtagagctttgaagggttattggtaacgatgaaacgttgctggtaacttttcaaagcttttttaataaaaagcttgaccgcgcctgttaatcttggtaatatataaaagttgtctcgacgagggacgtatggttgatgactcagcgatacgaaataaaaaagattttaaaaaacgcttgttatttaaaccttatcgtgataatatattatatgttgcttacggagctataacttctaagtaataattaattaaaaatagttgttgacagacgataagttgtgtgatatacttaagaaaaagaaaagcattaaacaaagacagcaaaaaagcggtaagacaaattcatttttgtcttaccgcctttttgctggtttaaacgtgcgtcatttgcaatcgcctttcggttaacgcgattgtacgctttattctgcgtgtctttctgggtagcgttgttttaattgttcaatgttttcgcgcgcgactttatcaaagtcgaggttattccattccgcaatttgtgataaataccaaagcacatcgccgattttcttagacatcattttttcatctagttcgtggccttggaacgcatattttttaacgatatcaaccacttcaccactttcacttgctaagcccaaagctaagttagttaacacttgttcgttaccatataacgttcggttggctaacttttgatagtcattaaattccattatgcttgtccccctattgcacattgcttttcaatccattcccaaactgtctctttaccagcaccagtcagtgcgctaaagcagacaaattgatcgactggattaaaatcaagcgcttctttgatgattttttcttgacgattccatttccccgttgagatcttatccatcttagtagcaaccactaaaacagggatatcataatacttcgcaaaaacgtacatcgcgatatcatcatcggttggttcgtgacggccgtcaattaatgaaataagcccctttagatttgagcggctggttaaataagcctcgataatttgcccaaacttctcacgttgcttctttgaaactttggcatacccataaccagggacatcgacaaagtaaagttcgttttcaacgcggtaaaagtttaaagtctgtgtcttacctggcttgctagatgtccgggcataactcttacgatcgatcaatttattaatcaatgaagacttaccgacattcgagcgaccagataacgcaatttcaggtaattgatcagttgggtactgcgaagcagctaccgcactcatcaccatttcaacatcatgtacttccataataacctccgattatttccttcgaatgttagtttagcataaataaataattattgcgccgttgacatctctctagtttcatggttaacatatcttcttaaccccgttaaatcgcgtcattgtaccgtttcaaaagtcccttaacgcaaaaaaactgccgcgacaaaatctaatttgtcccggcagtcttttaatttttatgacgcttcttgtccgtcagctaaaaagagttgtgggttggctgtgccatccaccgcttctttcgttacaacaactttagccacgtcttcacgacttggaatatcaaacatcatatccatcatgacttcttcaatgatcgaacgtaaaccacgggcccccgtgtttcgttcaatcgctagatgtgcaatcgcatggagtgcttctggtgtaaattctaattcaacattatccaaggccatcaacttgctgtattgcttaacgagcgcgttcttaggttcagttaaaatatgcaccaaatcatcttcagtcagtttttccaatgcagcggtaatcggaatccgaccaatgaattcaggaataatcccaaatttcattaaatcttccgttacaatttgttgcattaagctttgatcttcattggtagtttgaccattcttgcttccaaaaccaattgtcttttcacctaagcggtttttaacaatcgtttcgatgccgtcaaaggcgccaccaatgatgaataaaatattggtcgtatcaatttggattaactcttgttgtggatgcttgcgaccgccttgaggtggcacactagcaatcgttccttcaagaatcttcaagagggcttgttggaccccttcaccagaaacatcacgcgtgatcgagacgttttcactcttcttggcaatcttgtcgatttcatcgatgtaaatgatcccgcgttcagcacgatcaacatcgaagtctgcattttgcaacagcttcaagaggatattttcaacatcttcacccacgtaacccgcttcagttaaagtcgtggcatctgcaatcgcaaatggcacatttaaaatccgcgctaaggtttgcgcaaggaatgtcttcccggaaccagttggtccaattaacgcaatattactcttttgtaattcagtatcgccttcttcggccactgacatttggttgacccgcttgtaatggttgtagactgcgacagataaagcttttttcgcttctgtttgaccaatcacataatcatttaaaatggctaaaatttcttttggctttggcacttctagtaaatcactgaaggcctcatctttaaactcttcatcaataatctctttgcaaaggtcgatacattcgttacagatataaacaccagggccagccacgatctttttcacttgatcttgcgacttcccacaaaacgaacacgttacgggtccgttagttgtttctgtatcatctagcatactgggattctcccctttctcgatatacgcttaccgctgtgagtcgttaaaatacacccctacaacgtaattcagactatagcataactatggtctagaataaagtaaagttactcgcacaccgtcaatgacacaaaagcgggtccaaagtaaacaccttgaacccgctttttagcatcatttaaagcttggattgatcagacgaccttatttagcgtctttcacttctacagctgaatcagcaatgatttcgattgctttcttaacaccgatatcatgttttaacatgtcatctgataagacgctacgaacagcagcttcttccatattgtattgttcagctaaactcttaagttctgcagcaacttcttcgtctgttgcttcgatgttttcagcttccacaacggcttcaagtacaagacttgtcttaacgcgtttgtcagcatcaccagcgaattgtttcttcaaatcatcttcagttgtaccagtgatttgatagtacatctccgggttgataccttgttgttgcatgttacctaagtattgttgtaattgactgttgatttcttcgtcaatcattgcttgaggtaattcagcgattgttgcattttcagttgctttagcaacggctgtatcttggatagcagcatctgcagcatcatttttttgttgttttaattcttcacgaattttttcttttaattcgtctaatgtatcaacagtttcgtcgatatctttagcaaattcgtcatctaattcaggtaattccttagctttcacttcatggattgttaccttgaagatggcttctttaccagctaattcttctgcttggtaatcttcagggaaggttactttaacatcaacgttgtcgtctgctttgtgaccgactaattgatcttcgaaacctggaatgaatgaatttgagccaagttctaatgaatagttgtctgcttgaccaccatcaaaaggtacgccatctacagaaccagcataatcgatgacaacagtatcgcccttttcagcagctgcgtcttcttttaataccaattcagcttgacgttcgcgacggttttcaatttcttgatcaacgtctttgattgtaatgcgacggctttgttttggtacttctaagcctttatagtcgcctaaagttacttctggtttaacggtgacttgagcagtaatcacccaaggttcgcctttttccattttttcaacattaatttgtggttgatcaactggttgaatagcagcttctttaacagcagcatcataggcttctggtaagattgcatttaaagcatcttcataaagggcttcttcaccatacatcttgttaaagatttggcgaggcattttacctttacggaaacctggtgtgttgatatttttacgtacacgtttgaacgcaacgtccaaaccttcactaattttacttaaatcaatttcaaaggttagttcaccatcattggtgccctttttttcccattttgctgacataatttccctccgacagttatattcacaatctatcaattgcatacttaatcagcataaactatttaacctaaattgtaaatatttattggtctaaaaagcgataaaatccgatattttagtcgtttcaggccaacttttatcgaatttaatgcacaaaaaaactcgcagtttttacactacgagtttttcgattcaactaggttgaatattagtcgataatttcactaacgacaccggcaccaacagtacggccaccttcacgaacagtgaacttaagacctttttcaatagcaactggtgagattaattcaacagtaaatgttacgttatcaccaggcataaccatttctacaccttctggtaattcgataacacctgtaacatcagttgtatggaagaagaattgaggacgatagtttgagaagaatggtgtatgacgaccaccttcatccttgctcaagatataaacttcacccttgaagttcttgtgagtttggattgaacctggtttagctaaaacttggccacgttcgatgctatcgcggtcgataccacgtaataaagcaccaacgttatcgccggcttgaccttgatccaatgtcttacggaacatttccaaaccagtaacagttgtcttagcaacttcgtctttcaaaccaacgatttcaacttcgtcaccgacagtaacttggccacgatcgatacgacctgaagcaacagtaccacgaccagtgatcgtaaatacgtcttcaacaggcatcaagaatggtttgtctgtgtcacgttctggagttgggatatattcgtcaacagtagccattaattcttcaacagctttaacgtcgtcagcattgccgttcaatgcaccaagtgctgaaccgcggataactggaatatcgtcaccagggaaatcgtattctgataataattcacgaacttccatttcaactaagtccgttaattcgtcatcatcaactaaatcagtcttgtttaagaagacgatgatgtagtcaacaccaacttggtgagcaagtaagatatgttcacgtgtttgtggcatagggccatcagttgcggcaacaactaagatagcaccgtccatttgagcagcaccagtgatcatgttcttaacgtaatcagcatgtcctggggcgtcaatatgtgcataatgacggttttctgtttcgtattcaacgtgggctgtattgatagtgataccacgttctctttcttctggagcagcatcgatgtttgcatagtcttgagcttcagccaagcctttgtctgccaacatctttgtgattgctgctgttaaagttgttttcccatgatcaacatgtccgatagtaccgatgttaacgtggggttttgttctttcgtaatgtgctttttctgccattaaaacgaacctcctgtattttcgcaagaaaaaatcagtgtttagatttactaaactgataatcctttacataatattataatacttcaagcgctaaaatcaaagtgtttttttacacttgaagaattcaaaaatgattatatctgctatgagcgcgtttgtaaacacttaatgctcaaaaaaagtcagttttgaaacgatatttaggtgttttctactctaaaaatcaagtttccctgtcatttcttgcaactttttcacccagtcctgtatcttttctgaaataaccactgacgcggtataatccggacccagtaactgtttgagccatgcttgcgtccactccgtaggattatacatgatttcagcttcaaaaggatataaatatgcaaatcccatctcaacatccaccatcacttgtgctaacaaagtcggatcttcagtggctaactgctcatttaacgccgctaacaccgcattaaacgtcggactctcctccatcaattggatatcggcaggtacaaaagtttttgtctgttcaaaccattgcatcgtgactaattgttcaatattcagctggacgagcgtttcaatgacagtcgtcttcacgaaagcatgactgtaaggattcgttaaaatgggcgcaatactggtgacataaacattacgtggtaattgttcagcttgcgtcaacattgctagctgttcagctaatgggtgcgcagtgaggttatagaggccctctgcttgcttttgaatcgctgcttggtgattcgcttggtattctaattccgcagccgtaatcattattctaagcgtcttaatgacttgcggggcaatcgtcgcatggcgtaatgcctcccacacttgatttgccgtaataaaacggtggttattcagtaataatgcaagataaaaccgcactaaatctgtttgttgtaagtagtccgcttgttgttcttcgacgattgtcaatgctgtttgcggatcaccagcttcaatcagcgcactggcccacaataaattcgccgacaacgtctgttctagttgatacgcagcttcaaaatggtcgcatgcttgctgccaattttgttgatttaacgctactttccccatccgtatcagccgatcatactgatctggaaattgcgtaatgtcacccattcaatcacttccttttgacaattaataaaacaatagcgcctagaatcaactgacctgatccagacgctattgtttctaaatgttattcagcggctttttcagcctttggtttattatcttttctttgacgacgatgattttgattaatttccataatcactggtagaatcactggccgacgtttcgtttgttcatacaagtaatgacttaagttttcccggacatcttgtttcaaatgactccagtcaaattctttgttgtccagattattttgcaccgcatttttgataatttcggtactctcagccattaaatctttgctagtcttcacgtaaacaaaaccacgtgcggtgactttcggttccgcgataatcttcttattcttgcggtcaatcgtaacaacagcgataaaaatcccgtcttctgataataattttcgatcgcgtaaaacgatattcccgatatcgccgacaccgctaccgtcaatcatgacgtcagttgcgtcaacttgtccgccaacatgcatcttccctttttcgtaagcgacaatatcgcctttaccaacgatgaaaatatctttgtaatccattcctgtttcatgagcaatatcagcgtgtgctgctagttgccggtattcgccttgaacaggcattaagaattttggttgcattaaattcaacattaattgcaagtcattcttattggcatggcctgaagcatgtaaatcatcgccaaccgccttaacttcgccacccgcacgataaatcatatctttggtcttcgctaaaatcgtttccatcgcgtgtgaaggagatgtcgttaaataaaccaagtcgccttcttcgatgtgaattaaacgatgatgactagttgccatcttttgaagcgccttgattggttcgcccatccgacctgtttctaagatcactgtttgttctggtgcaagtgtgcttaaatctttaggttggaccaagatatcgtcatctggcaaaataatcatcgataatttcattgctgtccggacgattttttctaaatcacgacccgttaaaaccactttacggcctgttttataagccgcatcaatgacttgttgaatccgcataatatttgaagccactgaagccacaatgatccgacccgtttgatacttgaacgtttctaagatggattcagcaatatcgcgttcgttagccgttgcaaatggtgattccgcattagcagaatcactcaagagtgctaaaacaccttgtttgccaatttcagctaagcgtgcataatccgtttgatacattggcattgctgattgatcaaacttaaagtccccagtataaacgacttgtccttcatccgtcttaacgacaatccctaatgaacctggaattgtatgcgttgtcttgaagaatgaaacggttgcgcgttcaaaatcgattgctgtattcgcatcgatgacgtggaaattttggaacttacgtaattttggttcgctgctaaccgtaattttagctaaagcaatcgttaattcagacccaaagactggtacatcatgttcctttaagaaataaggaagcgctccaatcgcatcagcatgaccatgtgttaggaaaatcccagcaacacggtctgcattttcttctaaataggtcatatcaggaataacgatatcgatccccaataattcagtttctggatatttcaacccacaatctaatacataaatttcgtcgtccacttcaacaatgttcaaattcttaccgttttcacgaacaccgccaagtggcataatcttaatgttactcattctttcacctctagcacttgaggaatttattccccaaactattttgtttgttttagtcgttcattcgtttaaaactcatccgccttaaagtctaactcatattttatcacaatttaaacaaactaacagcttttgattactaaaagccttttgagcacaaaaaaagcgggtccgcataacggacctgctttttgaaaatgaattaacgacgtaagccaaggctcttgattaattcacggtaacgttgaacatcgctttcacgtaggtaacgtaataagttacgacggtgaccgatcttcttcatttgaccaacatatgaatggtgatctttcttgtgaacagataaatgttcgtttaatgagttgatttctgcagtcaatacagcaatttgtacttctgctgaacctgtgtcgccttcgtgacgagcaaattggttaatgatttcgttctttttttcttgtgaaatagccatgctaatttccacccttctggtataatagcctagaacaacgtaaagcgtcgggtgaacgtcgctaaacagagtagtaggcctgtgcaataagcacttttcaagtttactaaatattagcgtcaaaagcaaggcacagtttcaaactatttaagcagtcaagttgaaatactttacaagtttttattgcaatcactctcactattttggtataataacgactgttgaaattaaaaatcttttttataaagatagtgaaacccatcggaggtgaacaacatgccacaaattaaatctgctatgaaacgtgtgaaaacaattgaaaaagctaaccaacgtaacgcttctcaattaagcacaatgcgttcagcaatcaaaaagttcaaagctgctaaaacagcaggcaacgaagaagctgcagacctattgaaagctgctacacgcgcaatcgatatggcctcaacaaaaggcttaatccatgccaacaaagctggccgtgacaagtcacgcttaaacaaaatgatggctaaataatttaaccacaaaaaagcccccacaaccatttggtttgtgggggctttttttgctttaagcaacatcatctgtcgcaaattgtaacataaacagttcaaacaataaggttgcttcaccttgcccagtctttattttttcttcaatgccctctaaacctagataggcttgggcaagcgtcgccttagaaaagtgccgaatttgttgcaatgctaatttgatgcggtatgggtgaatttttaagacgctcgccaaattaccttggctataccctttttcaaaaagaattttcacttggagtaacaagcgaaattggcccaacaagatggcgttaattttcagcggttcttctttttgtagcaataaatcgtgatacatctctaaaaccggaccgacctttttttgtaaaactaacggcaccaattcaaaaacattatcttcaatactacttgccactaatgcactaacggccgtttcagtaatcacccggctttgttgcgcgtaaagcagtaatttgggtaattcagccataatctgactgtaatcaccattagtcttgcttaacaataacgtcattgccgctggttcaatcgtgacttgttcactttgcagttgcgctgtcactaactgctggacctggcgctcattaatcttttgaacgtcaatgacagttgccatcttcttcagttgtttaacaatcttcttgcgttcatccaacttcgcgtatggcgcgaagataacgagtgccgttgtcggttgtggctgttctaaataagcttggaatccttttaaatcatgatcaagtttagttttaactttttcacctgttaagaagaatggattctgcataaaaacaattcgtcgctcaccgaaaaagggggccgattccgcatcttctaatgcccgcgccacctccgtctgggcgagatcataactcgcaaagttcatcgtcatttcttctgtcgaaagcgttgctttaaataacgctctaacctcttcaatcagcgctgactcttgtcctaatacgagatacaccggtgcaaatgttcctcgattcagtgctgtttttagttgttctgtcttcatttagtcacaatcctttagtgttgttttaatcattggcacttggccaaaaccatagcgccattccagcatcccacagtcagccgtattccaaaatgggacgttcgcacgttttaaagtctgcaacgttgcggcatgtggatgaccataacgattatggcgtcccgcagaaatcaacgccccttttacctgccacgtcgcaattgactggggatcactcgccgtttgactgccatggtgacccacctttaggtaatcaacgcgtaattgtgggtagcgatcaacgattgccacttcacccgctttttctaaatcaccagtaaataaccaactcgcaccaccaatttgcgtttgcaaaacgagtgagtcagcattcccgcctggtccggccaccactggcgctaacacattgatttgttggtgaccaatcataaaatgttggtccgccaaataaggctcaattgcaacttttgtaagatgcggccgcacttgccgttgaaactgccggttttgcggtaagcccgcagcacaaatcaaccgtttaactcggatatgttgcataatttcatttaagtcccctatatgatcagcatcctgatgcgataatgcgattgcctctaaatgatcaatgccacagctgtagaggtaattaactgttactttttccgcccgactcacaatttgccgccgttgccacttttcttgcggtaaagctagtcggccgccggtgtcaattaacaggttatgtcgattgaagggttgttgaatcaacaggctatcgccttgcccgatatcaaacataatcacgcggccaaccggattaaagtggataccaataaaactaatgacatacaggctgataacagccccccagccccactttgctcgccgaccagtacttgccatcaaccatagtgtgcctatcacaattaaaaagagtggtattagctggattttaccgaaagtaattgtcgcatatgggaacgttgcaatccaagctaatcctttatacagcgtcgttagcaggccttcttctaaccaaactatcatatgactaacaggccataagcaaatcgctaccataatcaaacccaacatgactggtaagaaaatcggcgcgacaatcccattaatcaaaatcgtcaagatatgccaacgataattaaaccgcaagcacaccggtaaacttaacaagcctagccaaaatgccgttgtaaaagtaccatggcgccgctgataaatcaatccaaaagccatcagatagctcagcaatccccccatactgattaataaatacggctgccataaaagattgaccagcaatacccaactccaactatctaaacgcgattgctgaaaatgacttacttcgcagattaatcgtagtaagatcagcccgatagcgcgtgtaatactcgtgcctccccccacaaacaacgcataaaggggtagcaaacaaaacaagctaacattcacccattcacgcgggactcgacacagcgttgccaatcgacgaatgattgtcacaaagtagaatacatgcaatccggataaactcaataaatgaataatccccaattgacctaacacattctggtaggccaggccatctgactctcgaacaccacataacaacgcctctgcatgaaaactcaacgctggtggcaattgtcggagataaatcagcgcctgttggcgccgttggtggaaccaatctagccaaccttgtggtggaatgcgtctaaagaccgttccgtcaattatatttgcttgataaaaacaatgcttttgctgccccataaagcgcgcatagtcgaactcattccggttagtagcaccttggatacgctctaattcaatatcacccgctaataataacggctgattcgtcgtttgccaacggcgtttttccgctgaactctggcagcgatagtagcaaacaacacgttggtcatcattctgcccctgcgccattaattgaatctgatcgccagccactttgatcgtatcgggttgaatcttatatacttgattatttggtctaaccggctgttcgtaggtgcgccgtgccagccaaaaatggcaaccgcctaaacacagtaccagtccactgaccattaacacagctggttggcgtaagcaccacagtcgcagtagacacactatcaaaagacagctaaaaaaaagtggtgcttgtcctagtaataacgcatttaaacttgctaaacaaataactggataaacccagttattcttaatcactcagcagtttgttcattctccaaaaagttaacgagggtgttggcgtcattcgccgttaaatcgacttggtccaattcaatactagatttttcaatcaattcatacgcatattcgtcgttatgataatccttttgataatggattttactgatcccagcttgaataattaatttagtacactgaagacatggaaaatgtgtgacataaatttcggccccttccgtctgcacaccaaacttagcgcattgagtcaaggcgttcatctcggcatgaattgttcgtaaacaatgcccgtcccgtaataaacagccaacatcgatacagtgactttcatgtgccaccgaaccgttgtagcctcccgcaataattcgccgattacgaaccaccaacgcacccacaaacaatcttggacaggtgctacgcatcgacaacaagaccgattgaagcataaaatattgattccacggcattctcttttctgacacacgaattccccctttaaagttaatagttttagtatagcaaaaaaataccattcacaaactaattaacacaaatttgtggccgtaattgttcaaacgttttcggcccaattcccccaactttttgaagatcttcgatttgtttaaactgcccttgctcatcccgatatgcaattatttgttcagcttttttaggaccgatgccatttagcgtttgcaattgtgtcgcatccgcttggtttaggttgattttagcatcagttgatatcggactggctcccgcttgattgtcagtcgcagcctgtggctcgtctgccgctttcactaattcttcggcttgcaccgcttctcccttagttggcacatagataataagttggtcactaaatgtttgcgctaagttcaactgactcgtatccgctgcttcggtcacatcccccgcttgtttcagcacctcaaataaacgcgtctttgcaacacaaatcggataaatccctggatgtgccacagcgcctttgatatcgacaaacccaccttttgagacgcttttcttctgtttgacgggttttgccttcacttttcgcttagttgattgcgccatcaattgttgattggttgatagaaaacgttgttgccgactatgctgccaaaacacaccaccaccaagtaaaattatcaccaaacaaggtacccaccagaatcgacgataccgttgccaatagtcgcgccacatttttcgccacctccttattcctaattaccccaaaacgcaaaaaaaatttgccgattctttcgaaccgacaaattttttaatgtttggctaaataatccaatgcgtcgtccaagtttttgacaggaacgattttcatcttagtaccaatttttttagcggctgctttggcaatcgcataattattttgataatggggttctacctttagtatggcttttgtcacgggatcatcaggtgcgaaaaagactttggcgccttcttgactcgcaatcagtaccttcttatcaattccgccgattggtcccactgtcccatcaggatccattgtccccgttccagaaatcttgcgaccacccgttaagttttgtttcgttaattggttataaatctgtaacgtaaacatcaagccagcagaaggaccaccaatttcacccgcatcaatcttaaccggcacttttgtcacaatttttgagtgatctgtcagcgtaattcccaaaccagcgtagcgcgatttaggtaatttaatcaatttacgggtcgcagtcttacgctggccattatgttcatagctaatcgtgactttttgattcactttaagcccttgaacatacttgacgaacttatttgcactcttaaattgatgctgatcaattgccgtaattgtgtcaccaatagccagatcttttttaaaagctgaattatctaaaattgacatcacatagacacccagatattgagtgtggtattcctgatgtgccttttgataagccgcctcaatcgcaaaattaatcgagctttccatgtagtatttttgaatctgatcatacgcttcagtatcatcgtcacccattagttcatcacgactaataatctccgtaaaaggttgtgttttagacagtaatagctgtaaccccgtcactggtccttgaatcccgacggttgttaacataaagtggcccttatgttgatctcgttgaccgttaactttaacaaactggttggtattttcggccgaaccgaccccttcgacgtaataatgcgttgggataaagcaaaaagcaaacacgacgatcaagccaacaatccataggagatgcttcaatagacgtttattcttattcatattaatcactttcaggtcctaatttttgtgcaagcgcagacgcgacaaccggcggcaccaattgttcaacctggccaccaaacgttgcaatttccttcaccatacttgatgagataaaagcaaattcttgctttgctaataataacaccgtttctaaatcagcatcttgtgtctgattcaacgccgcaatatcacgttcatgctcaaaatcattggcattccgaataccacgaatcaaatatcgcgcaccgacttctttagcaaaggttgccgtcaacgtcttcgattgtgcgattaccttaacgttatccaagtgttgcgtcgccgcttcaatcagttcaaccttagtagttgcgtcaaataacggttgtttagcagcgttagtcattaccgcgataatcacttggtcaaacaagtgacttgcccgttcaacagtatcgagatgcccatttgtaaacgggtcaaaacttcccggaaataatgcaattttcggcatatagctgcctcctaaccaataaatttaaagattgctacttctgtaatcccataattctgttgccgtttcagtatgtaatgcggaatgtcagttggataatcaaccgtcgtatcggtttcgcaaagaatcgtcgcgtctggtgctaataaccccatttcgacgaattgttgtaactgaagcaacatctgttgttccttgtagggtggatctaataaaattaaatcgaattgaacaccagcatccgctagtttcaccaacgctttttcagctggcatcttccagattgtaaagcattctggcattttagtaaccgcaacgttttcttcaatcgtttgaatcgctgcatattggcgatcaactaaataagcatgatccataccgcgtgaaacggcttcaattgcgagaccaccgctaccggcatataaatcaagcgcctgcccaccgtcaaaaaattgccccaacatactaaacattgcttctttaaccttgtccgttgttggccgtgttttcatcccagggacagcttttaacttgcgacccccaaattctcctgcaataatccgcatctctattactcctctaattctgccgcatcggcaatttcttgatctgagcgtcctactcgattactgaaatccatatcaatagctggtctttcagaaggggtcactcgtttgacgtagtgtaatttttttaaccgttgcataacagtttcggcatctgccatatctacgtatagataaacatatttcattcgtttcgaggtgtaatacacaagtccgtaacggcgtaattgctttacttgtcgtaatgaatagagccagacgacaattccttggcgttgtgtgatttccaatgtcatttaatcagtccttttacatttagtcaaaaatcatcattgtttgttcatcggtacacagaagcgttaagtgctgatagcttggattattaatcgtaagttgcaacgctagattctgttgttgcgcaagcaccagcccttgggaattgagcccttgtggccaataaaaaagttgctcgcgctgcggaaaacccgctgctcttaacggagcctgtttaaagtcggttgctgttaaaaaggcgtccgtctcttgtgtcgcttgtttgcgcacttggtgcagcttttgcagtccctttttagtcaaccactgcgttggtgtacttgttaattcactcaccaaattctgtgtattttgcaatggtagttgatttatcgtgagcgcaggttggtcattattttggcgtaatgtctgcaacgtttgcaccaaagcgagttgtcgttgactatctgtttgcggttgttgcgactttgctagctcatccactgggactggtgtttttgaaacaactcgatataaatcagtttgtagcagtcggttcgcatttaaatacatcacagctgtcaatcgttcttgctgcatcactaaagttgcaaacgtctggtttttaaacatcactaacggcgtttgttggtgttgctccggcgttaaccgcaacttaaattgttgctcgtgtaacgtcactaagagcgaagttggtaacgccgtcttcttagttaatgtagcccgcttttgaaaaaaatgaaacggcgccacatcgttgtccgcaccaacaaccatgatttgttgtgtttgattggattggttatcaatcagcgcttcgacatactgtcggctatctaagtgaaataaccaccgtcgttgattttcatcagtcagctgttgctcgaccggttgcccataggttgcaattaattgttcagctggttgattaatcagtttcgccggcccttgtgttttcgtcagtggcgtttgttttattgaccgttcagtcgacggggcttgtgcaaccttaggctgattaaccgctggtgtttggataatcggccaaccataaaggatgaccaaccagacaatcaatgcaacgattaatcggcgtgccccttttatcatgctttcacctcactaattcgctgccgcagcttttttctcttgtgcgctgatgttcaacacgattcccagtgcaatcgctagaaccatcatacttgatcccccataactgatgaacggtaacgtcaccccagtaatcggtaagattcctagcaacccaccaacattgaatagggtttgcacgaaaatgatagtgccaattccgtaacataataaagtgtgatacatcttagtcgcatgaatccctaggtaaaaaatccgtgctagtagcgcaaatagtaacgcgataatcacgagggtcccaatcacacctaattcttcagtggtaatcgataaaataaaatcggtatacggttctggtaagtaaccgcgcttttggatactattgccaagccccaagccaaaccaaccaccattattaatcgcatagtaggaattcactaactgactcccacccatattttccaattcaaatggatgtaaaaacgataaaatccggttgaacttataagaattaacgttcgttgaaaagttaaagtgccgtaaaatactaaataaaatcataaccgttgttgtgaccgctgtaatcagcgaaaaaccataccaatatgacataccggtgccaaaaaacatgactaccatcacagcagccaagatactagcgccccctaaatcaggttgaataaacaccagtaggatgattccagcgactaatacaaccggactaaagaataattttaaattatcaacaaatccgtcggccagttcattttccttacgcgagagcatattagcaaggtaaataacaatcaataacttcgcaaattctgacggttgaatggtcagtggtcccaattgaatccacgcggtagccccattaatcgctgcgcttggtctgaaacgacttaacagcaataaataaatgagcgccaagaaaaccacaatcgtcattgcttttagaaaagtgcgattttttaaaacggataacttaagaaaatatgtgatcatcatcaagataaagcctaatgcgataaacactaattgcttggtaaaatatgcatctggtttcattccgcgaattgacattaaatccgaactcgccgaatagaccattaaagcaccaaatgcacataagataacatatggtagcaataaccaatagtctaaatactgaattttacttttttgaaactttttccacacagttacacctaatttctatttcgttcgtattcagcctgtccttgcccaacttgcatgccaatttgattgacccgttcttctaactcacgcatcaaagttgcaccctgtggcgcactaataagttgcatccgttttgcaaaatcaacctcgcgcgagaaaccaaataattgggtatcaattacctcttcaataattggacattgactcatacaaagcgcatcaatttgagcacgcaatagttgctcaatgcgtagcgtatccgcttctaaagtgagataagctgttgttttttgttcaatcataatttacgcctacctattcgttattaaaaagcatactctgttcgttattataccatatttatgcacaaaaaaaggtagccaagcggctacctctaatggtttttaatgattaaccttttttacgtttcttatcagctttttgacgcatacttgtgtcaagaatcttcttacgtaaacgaacagaagtaggtgttacttcacagtattcgtcatcgtttaagaattcaattgattcttcaagtgacatttctttaggtgtcttgatggcagctgagtgatctttaccagaagcacgtgtattcgttaagtttttacccttagtaacgtttacggcgatatctgtatcacggctgttttgaccaacaatcatgccttcataaacatcaacgccagcgccgatgaataattggccacgatcttcaactgattgtaaactataagttgttgatgaacccgcattgattgaaactaatgcaccgttacgacggcctggttcccagttcttaatcactggcatgtatttttcgaaggtatggttcataattccgtatccaccagtcatcgttaagaattctgttgaataaccgattaaaccacgtgaaggtgctaagaaagtcatccgtgtttggttattagcatcactttccatgttttgcatttcacccttacgttgggccattgagtcgattactgagcctgtatattggtcaggtgtgtcgatttgaaccatttcgaaaggttcgcatgtaacgccatcaatatcgcgatagataacttctggacgtgacaattgtaattcgaaaccttcacgacgcatttcttcaactaagattgaaagatgcaattccccacgacctgaaacaatccaagcgccggctttgtcggtatcttcaacacgaagtgaaacgtcagtgtgtaattggtgacgtaaacgttcttcgatcttacgaccagtaacgaaatcaccttcacggccaacaaatggtgaatcattagcagcaaatgtcatttgtaaggttggttcatcaatccgtaagattggtaaagcctcttgatggtcaactggtgtaacagtttccccaacatagatatcttccatcccagaaacagcgattaaatcgcccgctttggcttcttggatttcaacacggtctaaaccgatgaaaccaaaaatcttagttacgcggaagttcttagcagaaccgtcaagtttaagaacagaaacttgatcaccgatcttgattgtcccacgagaaacgcggccaatcccaatacggccaacatagtcgttataatctaacattgccacttggaattgaagtggttcgtcactattatcaactggtgctgggattgtatctaagattgtgtcaaagatagggttcattgtatgggcttgtgtatctaaatctgattcaagacttgatgtcccgttgatggcacttgcgtacacaactgggaattcaagttgatcttcatcagcaccaagttcgatgaataattcaagcacttcatcaacgacttcttcaggacgagcgcctgggcggtcaattttgttaatcacaacgattggtgttaaatgttgatctaaagccttcttcaaaacaaaacgtgtttgtggcattgtgccttcaaaagcatcaacgactaataacacaccatcaaccatcttcatgatccgttccacttcaccaccaaaatcggcatgtcctggtgtatctaagatgttgatttgtttgccgttatatttaacagcagtattctttgaaagaattgtgatcccacgttctttttcgatatcatttgtatccattgcacggtcagaaatttctgcgtgaccatccaatgtatctgattgttttaacatttcgttaactaaagttgttttaccgtggtcaacgtgggcgataattgcgatattgcgaatgtcttctctttttttcaagtgtttcagcttcctctcgctagtgacttgactagtgttgtttgtctcatgtatacaagctattattttaccataaaaaaatgggctgtgcttcatatattagcgtttttttgaaaatacgcaagtttttttcatgaaaatttaattatctttaatcatttgaaccattcataatcgtgacaatttcttgtgttgcttgctttggcgcgataatcatcccttcttttcgcatcatggaaattggttgaccatcaaattgtaaaacttgaaaacctaacgtctcagctaaaacccgacctgcagcaatgtcccatggcgctaatttggagatgtaagcttgcacttgccccttcaacaaatgggcgaaagtgataccggcgctaccgtaaatccgcacacccgaacattgatacaacacctcttgcaagtgtgcttcattggtgaccagcatccgtgtattgacacagattaacccttcttgcaacggctcgtcgacagcatttttgagggcagcttcgttttcgaatattcccaactgtggaccgccccagaacaattgatcggccatcacatcataaataatcccgaatagcggctgaccgtcttcataaacgccgatcataatggcgaaatttgcccgttgcttcacgaaattcatcgtgccatcaatgggatcaataaaaaaagttagtccctgttgccaatcatcaggcacctcaccggcaccttcttcccccactaattgcgcgttcggataagccgtcttaatcttttcagctaagaaagcttgattagcacaatcgacattagtcactaaatcattaggcccagacttagtactaaccgttaatggttgtttaatttgtgtgcgggtataggcagctgcttcaaggatccacttttgcagcgaacgacttaaccgatacaatgcttcttgttccattttttcatccactttcactaattaagcgtcattttgatttgggttcgactactcttctttgtagcctgcatacaccgatatattgaatagcctgacgcttctgaaaaggccttatcaatttgtttttcttgcatcttactttgaacaaccactttgaagtcacgataagcagcttgtaaatccgcaactttcgcaccaaattcataagcttgttcaacaagattatataatttcatgacttggacaacttcagttggcgtccagtctggttctaaaggataactatagttcgtttgcataaaggctcctaaaatttgcataaatttgcgccagtttcaattcaactgatgccattaatctctcatattataacgcacttttttagaagctgtcgaatccttttagaaatagcggaatcaaaaaacgacgcactcaactggtgcgtcgtcattctaaactatttattaaatatgaattggcaatcctaatgctaattcggcatcatccataatcgcttcacttaacgttggatgtggatgaatggttagagcaaggtcttctgcattcatgcctgattcaagggctaacgtcaattcagaaattaaatcactcgcgccaacgccagcaacttgagcgcccagaactgtgttatcatccgtattcgtcactaaccgcacgaaaccttctgtatctgctaatgataaagcacggccattagctgcaaatgggaacttaaatcctttagcgttcattccttttaccttggcttctgcaaccgttaaaccggtcgttgccaactcaggatctgtataacaaacagctggcattgcgtggtaatcaaccgttaatttcttaccggcaatggcttctgcagccactttagcttcataacttgctttatgcgccaaagctgctccagcaacgatatcgccaatcgcatagatgcccttaacgttagtttggccttgttgatcaacttcaatcaaaccacgatcagccatcttaataccggcttgttcgagtcccatttcgtcggtatttggccgccgaccaacagtcaccatcacgtaatcggcaacaagttgttcttctttgccgccgacttcatatttaaccgtcacattttgatcagtttcaacagcttcttttgccattgcgccagtaatcacatcgacccctttagctttgaagttctttgtcaccaattgcaccatatctttttcgaagttaggtaaaatcgagtctgtcccttcgagaatcgtcacatgtgcacctaagttggcataggcccctgctaattcagagccgatatagccaccaccaatgaccactaattcttttggtacttccgttaagcttaaaccaccagttgaatcaataacccgtttattaaatttgaagcctttaatttcaattggacgactaccagtagcaatgattaaatttttaaaactgtacgtttgtgcactctcttctttaatcacgcgtaagctatgttcgtccactaaaaaggctgaaccgtctaacacatcaatcttgtgttttttgaacaacattgaaatgccaccagttagtttttcaacaacctcatgttgtttccagtcttgcgttttcgcaaaatccaatgttgctccagtagtcgtcacaccaaagacagatgaatctttcgcctcttgtagtcgatgaccagctgaaatcaaagccttggaaggaatacagccgacgtttaaacaaacaccgccaattgtttcacgttcaatcacagttactttttgacccatttcggccgcgcgaattgccgcaacatagcccccaggacctgaaccgatgactactgtgtctaattcaattgcaaaatcacctacaaccattttaaaatcatccttccatcaataatagctctggatcagctaataattcttttaattcgttcatcgcacgttgcgcagttccaccatcaattaaacgatgatcaaatgatagtgataatttcaagactttgccaacagccaactcacgatcagcgttgacgattggttctgtcccaattcggccaacccctaagattgcaacttcagggtagttaacaaccggtgtaaaccaaccgccaccaattgatccgatattactgattgtcattgaaccaccactcatttcagctggtttcaatttgttatccaatgctttttgcgtattttcgccaatttctttagcgatggcaaaaatactcttgctgtcggcatccttgatatttgggacatagagcccgtgatcagtatccgttgcaattccgacattaatgtagtgtttataaacaatttcgttagttgcatcatcaattgacgcgttcaaagttgggaagtcacgtaagaccgttaccaaagctttaacgatgtatggtaagaaggttaacttaatgtccttcttagccgctacatccttgaatttcttacgatgggtcatcaatttagaaacttccacttcatcgaataaagtaacgtgtggtgccgtatgcttgcttgtcaccattgctttagcaattgctttacgcgttggtgacattttttcacgtgtttcccgttctggtgtaacagaggtgtatggtgtcgcagcaactggttgtgcagctggtgttgctggcgacgttggttgttctgctgtctctacagcaggtgctgtcgttgttgcagcgccattttgcatgaagatttgcacgtcttctttagtaatccgaccatgtttaccggtggctggcacttgactgatatcaacatcgttttcacgtgcgaattttcgaacagatggcatagctaaaatcgtccgattttggtcactaatcgcaactactgcttgactgcttggcgccgttgttttagctggtgttgattctgacgccgtagctggtgcttgttcagcagatgttgccgttgccgaattgtgacctggagcatcaatttcgaccaatacttgaccgacagtcgccacttcgccttcaccgactaaaattttaacgactttcccactaacaggtgatgggatttcttcaactgatttatcattttgaacttctaataaagtgtcatcttcttgaatggtatcgccttctgcgaccgcccatttttgaatttcaccttcggcaatcccttcaccaatatctggtaatttaaattggtaaacaccacctgcatcggttgcagtcggtgctgcttcgggtgtagcagctggtgttgccgtacttggtgtatcgttaccttcaacacctggtgcgtcaatttcaaccagtacttggccaactgttgccacttcaccctcaccgactaaaattttaacgactttcccactaacgggtgatgggatttcttcaactgatttatcattttgaacttcaagtaagacatcatcttcttgaatcgtgtcaccttctgcgactgcccatttttgaatttcgccttctgcgatcccttcaccaatatccggtaatttaaattgatatgccatacgtctaacgtcccttctttcgttatcgactaaaagttaataacttctttaaccttattttcaatatcagttgcatttggtaaccaagttgcttcagcttgtccaaatgggaatggcgtatcaggagctgaaacacgtgcaattggagcttccaatgaaagaacagcacgttctgaaatttcagaagcaacttgtgccccaacgcctgcttgtttttgtgcttcttgaacaataacgacccgccctgttttttcgacagaggcgataattgttgcaacatctaatggtgcaattgttcgtaaatcaattacttcagctttaatattctctttagctaggttttcggccgctttaatcgcttctctcaccattgcaccgtaagtgatgattgaaacatctgtcccttcagtaaccacagctgctttatcaagcggcactgtataagattcatcaggtacttcttcgcggaacgaccggtataatttcatgtgttcaagatacaaaacaggatcgtttgaacgaatcgcagaaatcaataagcctttggcatcatatggattacttggcacaaccacgcgaatccctggaatttgcgtgatcattccttcaaagttatctgaatgtaattctggggtatgcacgccaccaccaaatggtgcacgaatcgtgattggcatgttgcgtgtgccacccatccgataacgtgtccgtgacatctggccagcaatcgaatccattgtttcgaaaacgaaaccaaagaattgaatttcaggtacagggcggaagccttctagtgctaaaccgattgataaaccaccaatcccagattcagctaacggtgtatcaaaaacgcggtcttcaccatgtttagcttgcaacccttcagttgctcggaaaaccccaccgttcttcccaacatcttccccgaaaatcaagacgttcttatcatctgcaagttctaaatccagcgcatttgtaattgcttgaatcatcgttttttgtgccatcttaattcgactcctttgcactgtactctgcgatttgttctttaatgttttgtggttggtcttcaaatgtaacattcaagaaatctgtgactttttgttttggcgcagcatccgcttcgttgatggctgctttaatgtctgttttaacttgttcgatcaattggtcttcttgatcttgtgaccaaagtcccttatcagttaagaaacgacgcattctaacgagtggatcacgtttcaaccaaatatcgtctgtttctttggtccgataacgagtcggatcatcccctgataatgtatgtggtccataacgataggttaatgtttcaattaagaccggtccgttgccagcagttgtaaattcacgcgcttctttcatcacttcataaactgctagtggatccatcccatcgacttgaatggcagaaatcccagctgcgacccctttttgagccaacgttacagcagctgtttgtttttcacgtgggaccgaaatcgcaaagccgttattttgaacaacgaaaatggctggtgctttaaaagcacccgcaaagttcaagccttcatagaaatccccctgtgaagtcccaccgtcaccggtataaacgtaaacagcattttctgattggcgcttcttcatcccaaccgcaacacccattgcttgaatgtattgcgcgccgataatgatttgtggtggcatcgccttcaaagattctggatacttgttaccgtcaatatggcctcgtgaccataggaatgcttgtgataaaggtagcccatgttgcactaattgtggcacatcccggtaaccagggaataaaaagtcgtctttagtcatcgcaaagttacttgctaattggctggcttcttgcccagcagttggtgcataaaatcctaaccggccttgacggttcaaagcagttgctcgttgatcaagcacacgcgaccaaaccatttgtttcatcagttcaaccaattggtcatcactgagatccggcatcaattccggattaacaacctggccagtctcatctaaaatttgaacggtcttaaaatcttggctctcatcgctcaataacttctcaaaattaactgcagctttattattgaccatagtatccatatctcctctttaaaaaactgttttaatgactgcttatatctgtattacttaagcatctttacaagactaatttagcatttcacatcactaaatgcaagcgttttataagctatattagtcagtttacgctttcattagtttttattatatgtgaatctaatcactagttagctagttttcacgtctgttctatatctgttataatttaatttcgttttctgttatataatagcaaataataggcacaaaaaaagagtccgccgtagcagactcatcgttaaatttaagttggggtagttctatgccaagaccggttggggtatctcagcgttgccagcatgcactaagagctcttgaaacactctgactactggtttaatttgttgactgacttgcacgcaccgttcacttacccgcaaatcatttaaatcaatcgcaaccttaatttgaccaaggttgactaacttaatcattgttagcaggattgccccgacaaccaacgttgccaagcccatgaaagcgaattgattaaccattaatactgcacaaaacgaaaccaatgcagctaccgccatcataaaagtgcttcccactctaactttaggtgtttgtgctttagcaccaaccgttgcatctagcacaacgccgtgcaccatttcagtcactgcttcgcccgcttcaataacgttaacatctttgttaactgttgcgattgtaacgggtgtcttttcgctagcagccaataccaaaatatcaccgggcacaatttgatctgcaccgattaagcgtaaaaagccatcacgcataacgctaacccgtgcttgtgaattttctaatactgcttctcttttagcagcttcgacagttgttaagccacttggccgagttgccaataaacgcattaacatcccactgcttgtaatgccagtgatgttaacgtctttttttaatttcttgtgcatcgcgttcgacactccttcccttttgaggaagtcgtcgtaaaccgctagcctaatgctggcagtaaaatgacagaccacctcgaatgatcaccatcgctactacttacaggtccttcagctgttttcatcattttactcaccagactttctctactttaaatttagtcataccgctttatccgacaaaaaaagacgcacaacaattgagcgtcatccatttatcatggcgttcccaatcgttcagttttagcactatatgacgtagaaaccatgttcagctacgttagaaaaagccttcattggcagtttcagttgactcaattggcatctctcgatgtttctgagtagcagcgtttgttcatataggagcctcacctaacggaaaagcaatatatctatactcttatactacccgtttcactttagcaggtcaagcaattcattccgttttaacttgaattgtgctagaataatgaatgacgaattaatcggaggtcttaactgtgatattaatgaaagatattatccgcgagggtaacccaacacttagaaaaatagctgaacctgttacttttccgctatcagatgaagatcggcaacttgctgctgacatgatggcatttttagaaaatagccaagatcctgaacttgctgaaaagtaccacttgcgcgctggcgtcggtttagctgcaccccaagtagatgtttcaaaacaaatgtctgctgtcttggtccctggaccagacgaacccatcttcaaagatgtgattatcaatcctaaaattatcagccactctgttcaaaacgcagcacttgctgaaggtgaaggttgcttatcagttgaccgcgaagtgcccggctttgtgccccgccctgaccgtattacactacgttaccaagatttagatggtgaaagccacaagattcgcttaaaaaactacccagctattgtgtgccaacacgaaatcgatcatctaaatggcatcttgttcttcgatcacatcaacaaacaagacccattcgcagcaccagatgacatgattattattgaatagaagtgcgattggttgtgcttagcaactgagcattaatacaaaattggcagttatcccacaattcgggataactgccaattttagattaaacgggagttgttgcacccaagcgcacgttaaagaagaagtgctgattcgagttggtcaggctttgaggcttaacggtaaaggctactcgagaagcacataaaaaagcgtgattgaaatctcattagaagatttcgatcatgctttttttatgcttccgccgcttcaggcgtatcggcaaattgactgttatataaattagcgtacacaccaccggccgctaatagcgaatcgtgcgtcccttgttcaacaatttgaccatggtccatcactaaaatcaaatccgcgtcgcgaatcgttgagagtcgatgggcaatgacgaaactcgttcgcccttgcatgactttttccatggctttttgcaataaaccttccaatcgggtatccaccgaactagttgcttcgtccaagattaaaatcttaggatccgcaatcacggctcgggcaatcgtcaatagttgtttttgcccaagcgaaacgttgcttgcttcttcatcaatcgtcatttgatagccgtttggcagcgtatggataaaatgatcgacattagcggttttagccgcatcaacgacttcatactctgtcgcatcgagtttcccgaaacggatattatcggtgattgaagcatgatataaccaagcatcttgaagtaccatcccaaattgggaacggacttgttgcttgcttaattgcttcgtgtcaaccccatcaatccgaatcgttccagatgtcacatcataaaaacgcatcaacaggttaatcatcgttgtcttcccagcaccggttggcccgacaatcgccactttatcacctgggttagcagtaaagctcaaatggcgaatcaatggtttgtctgggttatagctgaaactgacatcatcaaattcaactttaccttgaacgattgctggcaacgatgctgtttcattatcggttgcttcaactggctcatctaagatttcaaatacacgaccagttgcagcagcagctgattgaatcacaccagacaactgtgtaatctgtgagattggttggttcacttgccaaatatattgaatgaaggcttgtaaattaccaactgaaatcacaccgtgcaagacataataaccacctaacgttgccatcccggcatacgtcatgtttgtcgttaaaccaactaacggcatcatcaagccagaaacaaaggctgccttaaagccatagtcagttaaccgatccgtaatttctgcaaaagcagcaattgcgcgttcttcttgtccgtaaagtttcaagacactgaagccgccataattttcctgtacaaagccgttcatttcgcccaacgtgtcttgttggcctctaaagtacggctgcgatttctgaatgacccgtcttgaaatcaataacgatgctggaatcattattaatgataagagcgccatccaaatattaatcgtaatcatcatgatcacggccgtgatgatccctaagatcgatgtcacaacttgaattaaactctgttgtaaagcgttcgtaatcgcgtccacatcgttggttacccgtgacaagatattcccttgttgttgtgaatcaaaaaaacgaacgggtagcgcattgatttgcaaatcaatgtcgcgccgtaaatcacgcatcgcccgttgaacagcccgcgtcatccaaaacgagcctaaaaacatcgtcacttgatatagcaacgcaaagctcaaaatcatcgcaatcaccttcgcgatataactaaaattaatcgcaacgtgttgtgctaaactccgactgatttcagtaatggctagtcccatgatcactggccacagtgcattagcgagcaccgaaataacagttgcggtaatcgcaagccaaaatgtcacttgatacggcccaatgtagcgcattagccgtttaagttctctaatattcttcattgagttcctcctgtgataactgtgatgccgcaatcgcacgataaatctcgttatcttttaataagtcgcggtgagtcccaataccaaccacttgaccttcgtttaagacgacaatccgatcagcattcatgatagtcccaactcgttgtgccacaatcagcactgttgcctctttggtgattgacttcaatgcacctcgtaacgccgcatccgttttataatccaatgctgaaaaactatcatcaaagatataaagcgcggggcggcggacaatcgctctggcaatcgccaaacgttgcttttgaccaccagataaattgctcccaccttcggctaaataagtttgtaagccgtctggtttttcagcgacaaaggtatctgattgtgcaattttcaaagctgtccataattcttcatcagtcgcattcggattaccataacgcaagttttccgcgattgttccggtaaataacaccgctttttgtggaataaaaccgatcttttggcgcaacgccttaagttgatagtcgcgcacatcatgaccgtcaagcttaatcgatccacgtgttacgtcaaaaaagcgtggaatcaattgaatcaacgttgacttaccactcccggtactcccaataaaggcaaccgtttcacccggatgcgcttggaacgtgacatcccgaacgactggactttcagtcggacctggataagcaaaggagacattatcaaacaccaattcaccttgtgtgtcggttgttgttaccccgtcttctttttcggtaatattaattggcgcattcagaattttttcaattcgttctgctgaaacagcggcccgtggatacatcatgaagacactggcaaataacataaatgaaaacagtacgtggaaaatatattcaataaacgcaatcaacgtcccaaccgctaagtgaccaccatcaatctgaacagccccttgccaaatgattagaacgaatacgatattaaagatgaacgaaaagcccggttgtgctaaagccaccaacgtaaacagccggatagaactatgactgtagtcatcattcacttttctaaagcgtaatttctggaattgttcccgcacaaaagcacggacaacacgaatcccagtcaagttctcacgcagattcagattaatcgcatccagatttttttgttgttccgtcgacatcggttcagaaacgcgaccaatcaagacaacccccgttagcaggattggaattgccgcaaatacaatccatgagagcgattgacttgtccgtacaatcatgaaagcactcgcgacgatcatcatcggggtcataaaccctgtccgcaacacttgggtcataaattgcatcacctggaaagcatcattagtggtccgagtaatcaaagaagacacaccaaattcgccatactcactatgggaaaactgcatggtttgtttaaaaatatcgttacgaatgtcacggacgatattggtggttaatttgctaccagtataagccaagccaattaagccaattagtccgattaaacagattccaaccatcaataacccaaattgccacacaggaccaaaggtatgttgattaattcctttatcaataatttgtcctaataacgttggtaatcccaattcgattagaataaatccaaatacgcaaataaagttccaaaatagtaatttcttatatcggatcgtatagcgccacattaatttcatcggtgcaaactccttctagacttcaaatttaatcttctacctgtgccatatctttaacatactcgattgtttcgcgattgacaataaaagcaacgtcaaaatgcaattgttcttccaaaaaccacacatcagtgactagcaaagccggataacgcggactgacggaggcaatccgccgttcgtaagccacttcattgagttgttcctcaattgcggctgccacatcctttagtgcagacgatgtttgtcggatgggcacttggtactcgaagaccatcacattattgccccaaatttcagtgggcaggttcgaaaccagtttggcttgcggtgcataaaaatccggctgactcgcttgcattttttgataagccaccgttgcaatttcatccgcaatttcttgactactgtgttgtaaaatccgcgtcgctctttgtcggcgtaaccgtttaatcaaccaggttaaaaaaagcgctaacgcgacaatgataacgactgacaaccaaattaacataacaatcccccacttctattgctcactaatatgataattataaccgaatcgaggcaaacacgctatttagagcacgtcgctcaatgtatactttaccgaaaagatatgctaaaatattcttaaatgttgagtaatcaacccctggacggttaatctttcgtttaaaactatgatgaataataaaggagttttacaattgatttataaagtacttttccaagcagacaaaacccaaagccctctacgcgaggcaactaaatcgatctatttagaagcagacagtgccgttgaagcacgccaacttgttgaagacaatactccctacaatattgaatttgtacaagaattatctggtaagcaccttgcttttgaacaagaatcagaagattttaaattaacggagttttaattaaatgaaactcgatattaagaataacgaaaccgccgttttcgccgtagggggacttggtgaaatcggtaaaaatatgtatggtgttcaattccaagacgaaattattgtgattgatgccggcattaaattccccgaagatgaactcttagggatcgattatgttatttcagactatcaataccttcaaaagaaccaacaaaagatcaaagccctcgtcattacccatgggcatgaagatcacattggtggtttaccttacttcttgcaacaagtccctaatgtacccgtctacgctggtccattggcacttgccttgattcgcggtaagttagaagaacacggccttttgcggtcaacagaattacacgaactaaacgaagataccgtccttaaattccgcaaaacaagtgttgatttcttccggactacccattcaattcctgatactttaggggttgcgattcatacacctcaaggggtaatcgttgaaactggggatttcaagtttgacttgaccccggttggtaatcaaccttcccctaatcttcaaaaaatggcacgtttaggtgaagaaggcgttttatgtttaatgtctgatagtaccaatgccgaagtaccaaactttacaaagtcagaacgtttcgtcggcacttcaatccgccatattgtggaacgcattgaaggtcgcattattttcgcaacgtttgcttctaatatttcacgggtctcacaagccactgatgctgcgattgctaacggtcgtaaaattgccgtctttggtcgcagtatggaagcagcggttgtcaacggtcgtgaactcggttatttaaatattcccgatgaagctttagttgatgccaatgaattaaattcgttgcccgccgacaaagtgatgattctatgtacaggatctcaaggtgaaccaatggctgctctaagccggatcgccaatgggactcaccgtcaaatttcaattcaacctggcgacaccgttgttttctcaagtaatccaattcctgggaatacaatgagcgttaaccacgtgattaataagctttcagaagctggtgctgaagttattcacggtaaagtgaataacattcatacgtcaggtcacggtggtcaagaagaacaaaaattaatgctccggttaatcaaaccgaagtacttcatgccttgccatggtgaataccggatgcaaaaaatccatacggaactcgctcaacaatgtggtgtggaacctgataactgcttcatccttgaaaacggtgacgtcttagcactcacttctgactcagcacgggttgctggtcactttagcgccgaagacgtttacgttgatggcaacggaattggcgatattggcaatgtcgtgctccgcgatcgtaaaatgctctcagaagaaggtttggttgttgttgtggcaactatcaatcttggtgaaaagaacattctcgctggtccagatatcctctcccgtggtttcgtctacatgcgtgaatcaggtgaattgattagcgaagcccaacgccgagttttccgaatgatcgtcaatacgtttaacgctaacgacaaggtcactgaaaaccaagtccgcgaagcaatcattgatggcttacaagacttcttgtttgaaaaaacagaacgccgcccaatgattttaccaatgatcattcaaagtacagaataataagttttgcgccaggtcaatatatgacctggcgctttttttattgtttaatgcaagtttttattgtcaacatttggtaaaaaccgctataatatacaacagattactttttctgaaaggcggcttgttcatgccctccaatccccatttttacatcattttaaaccaagttgccggtaccggtcaggcagcgagtatctggcctaaaattgaaactcaattaaaacaaaaacaaattcactatgaccttcaactctcccactacgcaggtcacacgacccaattggccttccaatttgcaaagtttaagtacacggatcaaattttattaattattggtggagacggcacgctcaatcaagccatcaatggtctccagaatgctcagcgcggcgatattccgattgcttacattccttgtggatcgggtaatgacttcgcccgtggtgtcgggattagtcgtgatccattgaccgcactcgaacaaatcttgtcggccacaatgccaactgccatcgatttaggttattatcatgacacaacgaagaacgaccatggctacttcgttaacaatgtggggattggttttgatgccaacgtggtcagcaccaccaatcattcaaatcataaacgacttttaaatcgattgcacttaggctcattagcttacatcagctcattggttaaagtttttatgcaccaagatgcgtttgaagtcaccgtcacggctgatcaccaaaatcattattttaaacgtggctttttagtgaccaccactaaccatccctactttggcggaggggtccccatcatgcctagcgcaacggtcgacaaccatcaacttgatttaattgtgattgaaaaattgaatccctttttcttttgctatctttttgtgatgatgttgtttggtcggcacacacgctatcaagcggtgcatcactttgaaggaaccaacttagcgattcaaacaaaaacattagaattcgggcaaatggacggtgaagaacttggtagccggacatttgatattcactacagtcttaaaagccaggcattttggctaaagaagcaagcataaataaaaggcgctgcctccaagttgggggcagcgccttttaacgcgctcttcaaatcatgttcctgtgcctagcaacacaagtcaaccgattgctttcagcaatcattcgcattgttaggctagtgctcaaaagttgaccaaacttgattgcactcatttctttagaagtaatccgagaagtatggttggtccattggaataatattctcgagattttttagtgcttgtcggttggcttggagtctttcaatctttgccaagtatgatgggcgtcgatagctcatcagcattgttgttagtgtctggatgtcgcattgaattcgttcaccgactgggcgacttgtgacctgcacttttccttgttcatcccaataaacgccaaacgtaccgttattccattcagctaatggatcggtcaattcaatgtggaatgcttgcccgtccgtttcaaacggataagccaacaagaattcacgcacatcaacaatccgcgccataaaatatggcttaatcgtctggtcaatatcaccatcttctaataagaatgaaatcggttcatcctgatattgattacccttgacatgttcaatcattgaataatgcgcgccaatgaagttccacagaccaatccgggcttcttgattaagataaatcatttctttaatatggaagacttcgttggcaatccagtataaaacatagccggtgggttgttcattttcatcataataaacaccagcaatccgttcttcttcattttcccaacgccaatattcatcccagttcagttcgttacgaatcattgcaccgtgattttttagtgcaaaccgttgatacgttttaatcacgtcttcatcgtcaatatcaaggcgttcaacgtgcccatttaccggccgttgcttaggtaattggctatcacgaatatcataagttaggtgatcagacatgatctcccaccctttcttacgataaaacggaatgctgtatggatataaatacgatatccactgcttattctcacgcatcttgttcaagccgactttaaccaagtcatgcatcaaaccatgaccggcatattccgggtaagtcccgacaccagtcaaaccacccatgttaaatacctggccatgaatgttcacgcagcaatgatagatggctaattgtgaaatcagttcgtccccattaaaccatccgattacgtcagatttttctaatacgggacgtttggcgcgttctaattcgccctcttcgtagccactatcagaaacttcctgatcggtgacttgaaaaacataccgtaataagtcattaaattgttctaaatgttcaattgtcacgggtctaatctctaaattagatcgctggtcaaccattgtttcgcctcatttttcgttagttgtttaccctattatacactattttgatttcggcataaaatcgtacggtgtcaccccggtcatcccaatcattggatccacttgctgttgcgttagaacagtcggtgttaagacataactgattggcgtttcttgtattgcgtcgtcttctggcactaagttcagttgttcatcaacagccgtttctggcgcacttggtggtgccggctggtcaacaattgttttggcttctgtctgccccacactggccgtcttaatggcggtgctgagttgttcaccgttaaagacactttgaatccgttcttttaacgtcgtttgccgattggccgaaagttcctgagctgctttttggaaagcactcggttcaccaatcagaatcaacaatgatttagcccgcgtgactgctgtgtacagtaagtttcgcttgagcattcgttggtattgattgaccaatggtagaatcaccatttcaaattcagaaccttgcgccttatgaatcgacgtacagtaagccaatgtaatcttgtgccactcactccgcttataggtcacttctgcactatcaaaagcaatggtgatctcgtcaaccttgtccgcactctttttagcataggtaatccccgtaatctgcccgatttcaccattaaacacattttgttccggactattgaccagatggagtactttatcgccaatgcggtagtgaacgttaccaatgctaacttgttttttgcggtcatctagctttggattcatgatattttgaatcatcgggtttaactgatcaattccggctgctcctttgtacatcggcgctagcacttgaatgtccttagtttcaaaaccacgcgctttggccttagtaacgacttgttcaatcaccgattcaatttgatacggattacattgaatgaaactgcggtctttttgcggcttcaacaaatccgctggcagttggccttgattaatttcatgcgccaacggaataatcgttgactggtcatcttgccgataaatacgttgtaattcaaccgctggaataaccttactctgcaataaatcaaagaaaacttgccctgccccgacggatggtaattgatccttatccccaaccaatacaacctgcatatgactgggcaccgcccgtagtaatgagcgaaacaagtaagtatcgaccatcgacatttcatcaataatcaataggccgccttccaattctttgttaccggaaacatctggattattttcgcggccagtgattccgagtaagcgatgaattgtactagcaggcaaacccgttgtttcactcattcgttttgcggcccgacctgttggagcggccaataaaatcggaaacggcgtgtctttgtactcattaatatctaatgacagcccgtttaattcagcgtataacgtcacgattccgttaataatcgtcgttttcccagtaccaggtcctccggttaataagaacgcccggtgagtcatcgcaagcttaatcgcctcttgttgtacgtcatcgtatgtcatcttaaaccgtttttcgaggtggcgaatttcttgatctagatcatgtttaggatagctaagttgatcgcgttcattttcaattcgcattaaatggttcgcaatttgccactccgcattaaataacccattcggataaatccgattctcatcaccaacgactttcccatcatgtgcaagtgccatcagttgttcagccaccaagttcggatcaatggcaacattgcgtgctttttccatcaactcaatactagctgccaataacggcttggcctgggtataggtatccccagcttgattggtcaactcatttaacgcttgcattaaagccccttgcacccgcacggctgaatcagcggcaaacccgagggtctccgctaaattatctgcacgtttaaagccaatcccagcaatgtcagccacgagttggtacggattttcttggataatcttcagcgtatcttcatggtaggtctgatagatgttataggccatcgagctcccaaaaccatagttgtttaagccaataataatctgttccatcccattattaatcgtcagcgtttcaacgagttgtgcttgtttcttcgcatttagccccaatggttctaacgccgtcggatcctctaatattttatcaatcgcgtcaattccaagagtatccacgattttttcggccgttttctgcccaatgcctgtgaatttttcgccagacaaataagcgactaagccggccttagtcgttggttggtccacttggtaattatcggcttgaaactgtttgccatatttaggatgagtgaccactttgccatagaaggtatatcgttcatcttctttaatgtcgccaaaactcccggtcaccacaatttctgtttcgtgccagtcaatcgtcttatgtgctactttaacgagtagaattttaaaaaaattatccgggctctcatagaaaatactctggacggttccggtgactgttggtttggtttcgtctgtctttgttatatccacaatcgccatcccttattctttttgctttttagcctgcatgaagccttcaatatcaattaactgttgtttgttctttttaaaataatccggtgcatagtgcttggcttgttcgaaataaggctcactatcagcgcctaagaccagttgcgtcaagccatacttaaataatacttcaccattttgaggtgcaatggtcaatgcctttttaaggtaggtctgtgcttgatcaaaatcacccaagctcgttaaaatatcgcccactaaaagattggcgtctagttggtctggttcttgctcttgaacggtcaacgcaaacgccaatgcccgtggattctgttcgagttgatgatatgtctgcgcaagcatatactgcgcatctgttgattgtgagtcttgcaccaactgcatgaacaatggtaccgcttgttgataagcttccgcttgataatagagtgttcctaatgcgtaagtcaatgcagcttcattaggaaattgcgtcaacgctttttgcaaaagtgcttcagcttgttcaaaatctttaagcgtcgttaaaaatgtcgcaagggtaacgtaagcttcaatgtcttctgagtgatcttgtaaatattgtacgagatctttaatagcggcttcgtggtcgccagcggcccattttgctagaattgcttgcacgtgatcatctcctatatcgtatctgttgcggataattgcttgctgaggaagtgtgtatcattccacttaattagtttgaaagatgctccttgatcgtcagttgtcatcgtggtcacagatgaatttgtcacaccgccgtctttgcggacctgagccaatggcgtcttgagtaaggactgcatcatcgccaccatcgctgccccatggctgacaataataatatgatcagtcggtttagcggccttcacaattgcgtcaattgcctgcgtcgtccgttcaatcacttgttcaaaggtttcccctttaatctcagttggatcatactccgctggtgcttcacgaaaggctttcacgattgtcggatattgtttttcgacttccgtaaagcgcattccttccattagaccgagattaaattcgtggagtgcatcaacaaccgtaatcggaaaatcctgccctaagtctcgttttagcacagcagacgttacctgtgtgcgttttaacggactcgtatataaatgatcaaaatgaatgggctttaaaaatgtggctaattcttcaatttcaacgtaactactgtctaataatggtgaatcaccgcgtgcaccttgatagcggcctcccaaattccattcagtcttaccgtggcggataaaatataaggttgtcatgcgttctctccttaaaataacttacttttcattatgaaagagttacgccctaaattcaagtcaatcgactaataaagcaagcatttttcctgtaaaacgccatcaaaaaaaccgctaggataaaaatactttttatcctagcggtttcatctattagttgctctaaacgtgtttcagtaggcatatttctgcggttaaccctatttgccaaatccagttaatcctcaaaatatgaacgcttacttacacactcttttatttactttctgcgacagcttgcattgcaattgcgttgacgtagttgactggttgatcgtagtttggttggaagaacatgtcaaccattgctaattgatcaatcgtcatcttcgtttgaatggccattgaaatgacgttcgctgcttgagcaatatcatacatacttgtgaatgaaccacccaatacttgacgcgtcttaggatcccacattaagttcatcaaaaccggtgtcgttgatggcatgaaatcagggcggtaatcttgttctaacgttgttgtagcgacttcaatcccacgcactttcgcgccttcaactgttaggccactccctgaataggtgcgaccaaataattcaacggcagaagttgcttgcgtgcccatgtacttttcagttggtgtttcgatgttgcggccgattaaaaggccttggcgaacagcgttggttgccaatggaatgtaatctgctttttgcgttggattgtaatgaacagctgctgaatcgccggctgcataaacatccttaacagacgtttgcatgtattcatccgtcaaaatcgcaccgttacctaacatatcaacttgccctttgaaaaggccagtatttgggcggaagccaacacataaaattgcaatgtcggctgtgtattcgttcttatcagttttaacagtgacttgatccgtccctgagaaactgaccactttttcgctaagcgcgagggttacaccgtggtcacggtaatcttgttccacgatttctgagatattaggatcgaaattcttgccgagtgcgtgtggtaatgcatcgattaatgtcacttgcttatcagttgttgcataggcttctgccaattcggcaccgatgtaacctgaaccaatcacgataacactcttcacatctggggcgctcttcttcaattcattggcatgcgcccagtttttgcagagcttaacgttcggattgtcaatgccttcaattggtggaatcacaggtgatgagcctgttgtgacgatgattttatcaaatttttcggttgtttcttcttccgttactaggttcttaacgcgtaatattttttgatctaagtcagcttctaaaacagtgtgttgcatcttcatgtgagcgcccgcttgcgctaacatttctggatttgaatagaacattttctgaggatcggctacatggccgcccacccaaagggcaatcccgcatgataagaatgataaattatcgtgtgtttcataaaccgttatatcccaatcaggatgttctgccaatgtttcttgtgttgcaaatgtccctgcgtgtgtacaaccaataactgctactttcatcatgttacctcctagaaatatccaaaaaacgacggttaatcgttgagaatttgtgaaatattacgcaaccagcatgtaactatattgtacgctacttagtttcgaaaagtcaattgcctccagctattaaattaatttcacaatctaaaacgaataaccacttatgttttaaacgttatattgtgattttattctaaaaaaggtcgttgaccacttattgaacaaacccacaaaaaaagtgctgataaatataaattcatcagcacttttaacgattaaattagatatattgtaatactttcatgtcagcatcatcgttcgcagccttataagccacgtcaatcgtgccgccacctaaacattctgcgccgtcataaaagacaaccgcttgaccaggagtaatcgcacgcactggatcatcaaagacaaccgttgcagttgtgtcagatgtcatgtggacggttacgccgacgtcttgttgacggtaacggaacttagccgtcacgtggaaatctgtcccatgatcaactggtgtgatccaagaaatattacttgcatctaattgatcagcatagagtaattcattatggtagccttgaccaacatataaaatgtttttgtctaaatctttaccaacaacgaaccatggatcattggattcgccaccgccaccgattccaagaccggagcgttgaccaatcgtgtagtacattagaccgtcatgggtgcctttttcaagaccgtcgaccgtcatcatcttaccgggttgtgctggtaagtattcgcctaagaattgcttgaagttccgttcaccgatgaaacaaatcccggttgagtccttcttcttagcagttgctaagccagcctcttcagctaaccgacgcacttctgctttttgcatgtgaccgattgggaacattgatttttgtaattgatcttgagaaagagcgctcaagaaataagtttgatctttattgctatcaccgccacgcaacatgtgcgcgatgccgttatcatcgcgttcaatctgagcatagtggcccattgcgatgaagtcagcgtctaattccattgcgtaatctaagaaagccttgaatttcacttctttgttacacatgacgtctggattaggcgttctgccgtgtttgtattcgtctaagaaatattcgaacacgcggtcccaatattctttttcgaagttgacggaataataaggaatgccaattttagaagcaaccttggcaacatcctcataatcttccgttgcggtacagacaccattttcatctgtatcgtcccaatttttcatgaaaacaccaatcacatcgtatccttgttgctttaacaacaatgctgtgacagatgaatccaccccgccgctcataccaacgacgactcgtgtattactgtggtcaaccacaatatcaccatcatttcaaatagattctagttttctacgatttgaaggtcgtgaattccagtacttaccattatagcaatcttggttaatatttcaaactaaaacactcacttttcataagttaaacgtaaaaaaagcagtttacctatcaaactcctggtaaaccgctcttaaaacgttatttagccttctttaattaacacttcacgtgccactaagttagcaataataaaattaaattgttcgacgttttcagcattcttttcactcttgaaaatatcgactggatgtaagccatctggagaggtgacagacatcttcaacgtctgtaactctttaccaattgtcatcttcaacttaatcgcactgttaaatggtgaattaggatctaatggccgttccatctggaagttaccattgtttgtgggcacaaagccaacatctcttaatgtgtattttttaacggcgggattgagtcgatattgcaccgtactccccaaaaccgttgctgttgtttttaataaagccatctgcctaacctccatacactgaataagtctattttagcacaagcacgtaaacgctgcctaccccttagcggcttgctttgctaaattgcgtttcacaatcttcgtgagcgcttcggcaaaagcagcgacgtcttcgctcgatgtttcgtgaccaaaactaatccggatgctttcggcaacgcgcgggctatcctcaccatacatcgcgatcaacacgtgtgagggttccaaatcgccagcagtacatgccgaaccacctgaaattgcaaagcctgctaaatcaagattcatctgcaagacataggttgaaacacctttaatccagaggttcacaacatgcccgacttgatcagctccttctgcgttcagcgcaaaatcaatgtcgttggcttttaaatcagctagtaattgctgtttgaatccagcataccgtgcttgtaggtctgctttaaccgctggggccaataattcaactgctttcgcaaaaccagctacagcgggcacattttcagtccctgcgcggcgcttcttttcttgttcaccacctaggacaaatgatggtaaatgaatcgcgtcgttgacatagagaaagccgatttgcttaggtccattgatcttgtgggctgaaactgccagtaaatcgatattgtcagcttgcacatcgatatctaataagccatacgtttgcgtagcatctgtgtggaaccaggcgtttgagtcgcggacaagttcaccaatttcgtgaattggcatgtgactgccgacttcgttattgcccatcataatcgatactagaatcgtttcgggcgttaaagccgccttcaaatctgcgagatcaatcaccccttgttcgttgacgggtaagtaaatcacatcaaacccttgcgtttctaaataggccatcggttttaaaacggaatgatgttcaattgccgttgtaataatccgcttgccttctttagcacgcagtctggctgtctgaaggattgccgtgttattactttcggttgccccactcgttaagataagctcgttatctttcgcatgaatgctctgtgccaaagtatggcggctggtatccaacaccgtgtgggcttggcgcccaaaataatgggtgctcgatgcattcccgaaatcggcctgcatctgttcggtcatcgtcgcaatgacctctggggccatgggtgtcgttgccgcgttatctaaataaatatgtttcacaatttttcgcctcattttaaaaagtatctataatagtttaacatagttcgcttttaaagcacggataaacacttttcgctaccaaaaaaggctgggacaaagataccttgtcccagcctttaaaacacttaatctcagattaagcagtcattaaagctgctttttgatctgctgttaatgattcattcatccggccactcttgaaaccagctaaatcaaccgttacaaattcaaaaccagcttgttgtaatgcttggttgatttgttcgctgtgggttaagaagtcagcaatttgtgcttctgggacttcaacccgggcgattgattcgtggtaacgaacacgaaccgttgcaaaacctaaatcacgcaagaatttttcagattgcatcacttgagcaattttggcttcagttaaggctgtgttatatggaaagcgtgaagaaactgaacagctcgctactttattccagttatttaagtttaatgcctttgctaattgacggacatcaatcttataaaaaccagctgtttgaaggacactttctgcgccagcttcgtcacgggcccgtaaacctggacggaagtcgctgttatcatccatgatcataccatctaaaacgtggtcaaagcctttttcagcagcaatttggttcaattgtgtatagaacatcttcttgctgtaataccatgtttctggtgtgttgttggcaatgtgttcgtcagataagtagttcaatgttgttgtttcgacattcgcgcccatatcatgtgccaagtcgatggctttgttaaattcttcgtctgtgaataattctgagttagcaacgactgctaagacgttttctttgccgagtgtttctaaagccatttttaaaactaatgtgctatcaatcccaccagaaaaggcaacaatcactttttccatttgttgtaaactgacagttaacattgcttttttttcagataatgtattcattgttaaagacttctttctatatcattagattaattgttttaaagctgttaattcattttgaatccgatcggcatacaccaaatcgttgttatctaaactcttgacgatcatcaagtttaaatgcgcggcactatcaacaaagtttttgaaagttgattgactagcggtttgttgcgcgtcatcaaggctaccataaagttgttctgctgttaaaagcgcttgttgcgcttcaattaaactggttgagattgtccccggttgtgaggcatgagcagcgacttcgaataagtcgaccatcatgttttgcgtttgtttaatttgttcacgcatggttgattcctccgattaaattagatgccaaagaaactccgcataaagagtgcggcacatagaccaccaacaaatggtgcaattccgggcacgataatcccgtattgccaatctgagttggctttatttttaattggtaaaagcgcgtgagcaattctaggacccatatcacgcgcaaggttcattgcgaatccggtaggaccgcccatccccatcccaattgcccaaacaagtaacccaactgcgattggtgcaatcccaggtgtcttgatttgtgtaatggcgataattgatgaaatgaaaacaaatgttgcgaaaaattcaacgaagaagttccgtggtaaattccggataccaggtgctgttgagaagatgttacgaaccgcaacaggatcgacattgccttctgatgctttaaattcatcagcgtacatgatatagacgataactgcaccgacaaacccgcccaagacttcagcaactgagtaagggataaacattgcccatgaaacgttgcctaagatacattgtgctaacaccatggctgggttaattgaaacatctccgaaaatgaataatgaaactgtaatcccaaacccccatgttgtaatggcaaataaatgacctgagccacgatactttgaacctttgaggacttcatcactgtgaaccccaaccccgaaaatgatcatgagcgctgtgcccatgaattctgctaataactgatgaatcatgaataaattcctccaaataataacgatttaatatctaaattttgatagctttaacgcgttacatcaggatagacccgactcgggcatactctgataaacagcaagataaacttgattaagtgccacgtcatgcgccttggcggcagctagacaatcgtcgaactctggactatatttttcgagatcgtcatagttcacgattttgacccgaatatcgccgaagcgcgtggctacagtgataaaatgacgtggcataatggtgcgccccatcgtctggtaacgcacaccaacagttgctgtgtgttttaagatcagataagtcatggcttgttgatcggctggatgaatcatgaccgttagcttaattgcgggccgatttttcttcatttgaattggactgaaaaaggcatcgagcgccccattgtccatcaataaatccaaaaccggcgctaaactttctgctgactggtcatcaatgttggcctccaacactaaaatctgatcggtatcggttttaacaacctgttggcttagttttttttttcgcacaacatcacgcgtaatgcattgagttgcggtgtttcccgattaccaaaaccatagccgactttaatgatcgtttgatcgtctgggattggacagaattggtcgacaatcgttttgacaatccccatcccagttggcgtgatcaattcggtctgcaagtctgggttttgtttaattggaatcgcactaccgacgcgcatttgcatcacagcggggactggtacgggcatcatgccatgcgcgactttgataaagccactcccatccgttaattcggatgaatagacttgattaactgccaataattcgagggcgacaaacgctccaacaatatcgacgattgaatcaagcgccccaacttcatgaaaatgaacatcacttaatggtaggtcatgaacgaccgcttctgattgcgcaatttctgtaaaaacttgtttggcgttcgttttaacataatcgcttaaatcactgtgatcgatgatggcttcaatgtcttttaaatgtcggacgtcatcaccatggctgtgcgtgtgtccatttgcgtgttgatgcgtgtgtgcatggccagctgcgtgtgtatgcggatgttgatgctgtgccggtgttgtttcaataaaaccttcatccttgtgcatggcttctggcaaatggacgtcaaaatcggtgccataaatactacttttagcaatccgttctgcatgtaggtggtagccagggacattcaacttagccaattctgtttcaaactgtttgaaatcaacccctaaatcgagcaaagcgccgatgaacatgtccccactaattcctgaaaatgcgtctaaataaagagttctcatttgtcatcctccgtgtcacttaaatgattgatcatacttgctgagtagcccgcaccaaagccgttatcgacattgacgacggtaatcccggatgcacaactattgagcatggtcatcagcgctgttagtccgccaaagttagtgccatagccaatactggttggcacggcaatcaaaggtttttcgatcaacccaccaaccacactggctaaggccccttccataccggcgaccacgatgacaacttgggcttggcgaatttcatccaaatgttcaaacaagcgatgaatgcccgccacaccaacatcatagattcgtttaacttgattaccgtatacttctgcagtgaccgccgcttcttcggccactgccatgtcggaagtccccgctgtgacaacggcgatatagtgatccgtggttggtagtgggtcaaccatcagcactacacattgcgccatttcatagtacattgctgtcggttccgcttcttgaatcgcagcgtacttttctggggaaactcgcgtacataaaatattttcggcatgtcgttttaacgaaccaatgatgccaatgatttggtccgccgttttaccggcgccataaatcacttccggatagccattgcgcttttgccgacttaaatcaaccttggcaaagcctaaatcatcaatggtctgcgcatgtgccagttgctttgttgcttctgtcacactgactttttggtttgcaacagcttctaaaagctgttgtagctcatttgttgtgtccaaactactcattctttctattgttatttcacaataacccctaaaccatcagggatcactgtcactttggcatctgccccttcaatctcgtaggcccgttctaacgctgcatctaaactggttgccaattccatatgcatgtctgtaattaattgtggatcaaccaaatctgacacgaaaatcacatgatgttggaccagaatccgagccaagatttgtgatgtccattgatcagggaccgtttcaagccgtggtgtattgattgcttggtctaagaattctttaggatccttaacgtcagcaatattgtgatagaacccatcaccaccatgcccgtcacgtgcaccagcgaccatgataatcacgccaccttgtttgttcgtcgcttcagcagcagtcatccctttaacggcttggtaaatattttgatcaagtggatagccaccatttgttgaaatggcgatatcacaatcgatcttgtcgacttctgataaactttcaacgaagtcacagccttttttgtgcgctgtttctaaattaccggcgaatgaaccgatgatgtgcttgtcttcatctaaaacaacgttcaagatgaattcaagcccagcttgtttagcggcataaaccatatctttgtggactgggttatgcattaaattcccggttcttgaatagtgggaattgatgaattcacctgagtggttggccataattgttttgtatgaagccacacccggtaaaacagacttccgcccgcctgagaaaccagcgaagaaatgggattcaatgaagccttcagaaatcaataagtcagcttcaacagcgactttattgataatgcaatcgccacctgatggcaattgaccgattttcacaactgagctgtcatcggttgaaacatgcatgacgatttcttcatttgcaacgatttcttcaccatatttgttaaccaattcttcgtgcgttgatggtcgatggaacccagtcgcaactaaaatccgaatccgtgcatctggtgctacagaacgaatccgtcttagtaaaatcggcgtgatgatatgtgaaggaactggtcgtgtatgatcagaactgataatcacgatattctttttccctttagccaactcttctaacttagggctatcaatgggattgtccaatgatttttcaaccgtttcggcttcgctcattggattttgatacgtagcagcttgtgaaacaagcttcccggcaaaattcgcgtctgcaatattagccgtgataattttttgatcgtaaggtaatttaatggctaccaaactataggacttcccttctcaatgctgattgaatgcttttttaaagctacgtccatagttatacagattttctgaaaaggatgcggtataatttatgaacaacatttcattattacttttaggtgtaacaaatgataacaactttatagtcttcaagacgtataatttagattaaagttatttaatgattagcagatataataaatcagcacaaagggtaggcagatgcattatggttttaacagacattgaatttttaattaactttttagaggaacgtcacgtcccagtgattaccaaaaagaagcacacatacttgacgtaccacggtttggaagaacggtatacttatattctgaaaaaaggcgtgattaaaaactcgatcattttacaagacggtcgtgaattcaatctctcttacattacccagccggatgtcatttcacttttacgggatgaaatttcaaaatatacggatcaaccgtttaacgttcgcgttgaaacagatgaagcaactttctatcagattgaccgcgtgaccttctggaactacgtgaatgccacccccgagttacagaattacgttaaaaattactaccgcaaaaaattatccgagaatatttatcgcttgcaaaaaatggtaatgaacggtaaaaacggcgggctgtgtgccttcttatacagcttaattgatctctttggtaagaaacgccgcgatggcatcctgattgacttcgtcgttacaaacgaagacattgccggcttctgcggaattagctcgcgcagtagtgtcaatcgcatgctcaaccaactcaaaaaagacggcgtgattgaaaccaccgagcataaattcttaatcaaagatgtcagttacttgcttgataatatcgccaattagcgatttgttaacatatgtaaacatgattcgtgattgaaaacggctatgagacgcgtagccttaatagtcgagaacaaatcagtggaggtttttatgtatgcatattccagataattatttaagtccccaaacgtgtgccgtgcttgcagcggccgctattccagtcattggcttggcactcaagaaagttaaataccaagtcaccgaaaaaaaagaaacggtccccatgttagggatttccgcttcactatcgtttttgatgatgatgtttaacgtgccaattcctggcggtacaaccgcccatgctgttggtgcaaccctattagcgattctcattgggccgtacgccgctagtctagcggtaacgattgcactcatcatgcaggcctttttatttggtgatggtgggattcttgcactcggggccaatattttcaacatggccattatcatgccatttgtcggctatggtctctatcgactattccaaaaagcacaccatcccaaagtgggagtcgtagttggcgcatatctcgggattaatgccgccgcattaatggccggtattgaacttggtctgcaaccactcgttgcgcataacgcagctggccaacccatgtatgccccttatccgttacacattgcaattccagccatgttgttcgctcatttattagtcgctggttgggttgaagccggctttaccctcgccgtttatcaattcatttgccgggttgcacctaacgaactgttcgttgcaccacgtcaaacagttgatccacaaaccagccgtcgtttacatcgcgcgctttacagtttcatcggcctattgattatcttatcgccgattggcctattagctagtggtactgcttggggcgaatggagcgcaagcgaactcgttacacaactcaaacatgatcacctaggtcacagtctaccaagtggtatggcccatggcttaaactttaatgccctctttagtgactacacagttgctggcgttccactatcacttggctacatcttatcagcggtaacagccgtcattgttttttatcttatcggaaaactggtgatgaatcattattcaacccaatcctaaattaccaacttggcttcaaacaacggaagctacgcccaaaacggtcgcgcaattcgaccgttttttaattcaaaatttgcgctttagtgatcgtttgctgcggcgctttaatcaaacaaagcctcaacctttaaccgcccatcaaacgcctggtattcaactgattagtttattggtgacactcatcattctcgtgttaacccatagtctacttttaatttggttgattggtttattgacgttaattcgaatttgccgcttaccaagccagcatttatggccgctttttaaacgcgtcggtgatatcagtatcattgcgattttattaattctaccgaatttttggctcggccaagtcgccacaacgcttttatttatcgtacggactgaaatcatgttattaaatattgctttctttctcgagacgatcacttggcccgcttttattgttgctttacgtcaattaagactccccagtctgctcattttgacactcgaaattagtctgaaatacagccacttgctcgcccaatttttacaagaatccctctgggcaattcggctacgctcaactggtaaaagccaccaacgacaaaatttagtcggttcactgattggccgcctctacttaagttcccgcaactacattaccgctttatacgatgcgatgattctccggggctacaccggacaagtcacccgacggacgccgctaacagtgaatcgctacgactggcgcttaatcagctgggatctagggctattttgcctattctgtttcattcggaggtaatcagatgctgaatttgcaacacattcactacgcctatacgcaaaccgacagccttaacgatatttctcttaccatcgatgcaggcgaggccgtcgcgtttatggggcctaatggttccggaaaatcgacgctgtttaaattaattaacggtttgattcagcccagcgcaggacaatattattttaaagaccaacttgtcgatgcccgcttcctcaaaaagcctgcacaggcgactgccctccaccgcgcaatcggctttgtgttccaaaatagtgacgttcaattatttaacgaaacggtgcgcgccgaactcgcttttggtccagaacagatgggcttagccccagatgaagtacaaacccgcgttgacgattgcctcgcgttgttacaaatcgaacacttagctgatcgcgtcccttatcaactttccggtggcgaaaaaaaactcgtcgctttgggcagtgtgctaacgatgaatcctgaaataattgtgctcgatgaaccattcaacggcctatcagccgcctaccaaacgctgattatccacttgctccaacaactcaatcaagccggcaaagggattttaattgcaagccacaacctggctcaagtcaaacaagtcgctaaacgggtggtcgtctttaatgaagaccatcaagtgacccatgacttaccactcgcaaaacttgaacaagaaccggaactgcaacgaactttagcattactctaaagagagtgtgttgtagttactgttaatcgcaggcatataactgatagcacaaatatgcggatatcaaaagcggcggatggcacaaaaataatttttgtgtcatccgccgcttttgcattttatattaatcgccttcgatttgtaaccatccctctgtcgcattgaccgtgattgactgtccaatcggtaacgttaaaatcggctgggtatgaccaacattaacgttgtacaaaacggggattgtcttcaaaatcggaaacttattcaaaatagcgattaaatctgtctcactcagcgcgacatcggttggaatacgaccgataatcagggccttcggatgttccatactctgtaataatgccgccaaattgcgtgaaaaatcaaacggatctgacccatctgagcactcaatcaataacacttgatcattataatccggttgataggctgtcccttgtaatgtataaagtgtatttaaattaccgcccactaacgtcccagttacacagccagacgtataactctgccaacgattaggctggtaatcccgcgctgcattcggtaagtaccacgcatcactcgaccactctttggaagccgccaaccgaattggtccagcttcctgcgtcatgactttttgccaattatgcgcttgataatcgcccaactgatctaccaatttaaacgaaatataggatggtccataatacgttatcaagcctgtcttagctgtcatcgcatttgccagcgcgctaaaatcggaataaccgcagattattttaggatggcttgcaatcaaatcaaaatcgatatagggaagtagctcattgctgttataaccaccagtcaccgctaaaatcgctttgacattgtcatctatgaaagcagcgtgcaaatcggcaatccgcgcttcaattggactagaattgaattggtccattatcaagacatgctgcccaaacgtcacctgataaccaagcgcactcaatcgatcattcgccggttgattagccacatatccgccaacactttgcaaactattactaggcgcgatgacccgaatctcatcgccttttgataatcgtttgggcatcatctaaatacactcctttcccatcaccactatgaaacgttcacataaacagtcaattgtcggttcaaatattcggcccacttccgcatactcagccttaaaaaatggctcgtgaactgaacgccaataagcaagcgttcgatcactctcgccctctaaaaaggcatgttcagcgtcgacttgatcatacttaacaatcgtgcacattatcgttttcgtaattgcaaccggccggtctcgtccatctaaaataacattataatcccccacttgtgggacatgctcatcgggttcatacaactcaatcgcagaagtggtggccgttttttgaccgattattaccaatcgtgccaattcattggccatttgttctgtattcccaaatgaataaatctccgctggttgtaaattaggtgataactgttgctgttccgtgaattgttgccaataccgctgcacctctggtgtcattgacatcccctcttccattcgtaacgttgttgttagtttagcagaatttaaccatttaaccaaaaaaagaaacttacccattaggataagtttcttttgatattttatgcccaccgacgcatctttttaagcatcatcggatagcttttaattaggaaccattgtttcatcttaccggttgtttggtcggcacgaatcccagcaatccctttttcaagcatctgttcaaaagtgattgttggttctgtccactgaccatcaacgtaacacagttggcaatactgatttgacttggtgccatcttgttcactaccttggttttgtgcagtcagtggcatgccacaactttgacagaatttttccatgttggactcctttaacgtgcttttcaaaccatgttcctacgtttagcctaattagccaaacaatcggcttcgccgcttattcgtctaattttgctaatcctcagaacataaccagtttgaacacacttattttcttaacgtgctttcatcaacagtttcctgcgctttgctacacttatcaaatcatcgactatgtcgctaattcgttaagttgtgcaaatgctcagaagctaaccgttgatgacgcacttcttttatttaatattcttcaagaagttaagcaacatcgatgctgatttttggcctgcttctacgatgaattcgtcaaacgttacgccggcttcttcgtcgccgacgtcgctcattgcgcgaatgacaacgaatggaatcttgaattgcgttgcgacttgaccaattgcagcgccttccatttcacaagagagcgcttcggggtaaatttctttgattgccttgattttatcttggctcgcaacaaattgatcaccggtgacaattaaaccaacacgtggttgtaggtcaaccgctttagcagccgcttcgatttgttgaacgatcttagcatcactttcaaatcgttggggttgttgtggtaattgacctggtaagtaaccaaaggtagttgcttctgcatcgtgataagcgacttcgcttgaaatcacgacgtcgccgacatgaaggccttcaccaatcccaccagctgaaccggtattaatcacaacatctggtttttcttcggctaataaaatcgccgtcgtcatcccagcttgcactttaccaattcctgattcaaccaacgtcacttcatgaccgtacaattgacctttataaaaggtattgccagcaaccgtgtgttgttgcacatcttctaattttgttaaaagcgtccgaatttcttcttccatggcgcaaatgacactaattttcatactaattctctccattctaaaaaaacattaactttaccattctataggaaaaaaagaatcaagtaaacgataataattaagccaaaggtaatcccaatcgcccaattcaaccgtttcttcattcgtttaaccgctggtggatcgactttcttagtccgacgcgttgctgtttctggttcgtcttcagtcaccgctttaagggcttctttttgttgttcacgtgcatattcacgttctgtcctgaggcgctcttgatcgcgctgtttaaaggcggcttcttcagcctctttttgttgtcgatattcttcgcgcgtcttaggttcattcgtcatttctaccgctcctattttgcttgtaattgccagtaatacaacgccataatcgttttggcatcacagattaaaccatctgcaacggctgcttgtgcttcttctaacgtcaacttttcgacgttcaagaactcatcgtcatctagcgagcgcttatgcgtgaccggcgttagtgtatcagtgtagtataaagtcattaattcatttgaaaaaccgggtgatgaaaagaaatccgtcacgtgcacgagcttttgcgtcgtcaaacccgtttcttcattcaattcacgtagtgcgacctgatctaagttcttttcacctggatcaatctttccagcaggaatttctaacgtttcacgttgcatgggggcgcgccattgtcgcactaaaaggatgctgttatccgccgtaatcggaataatgccaaccgccccatgatgatagacaatctcgcgacttgcggtttgtccatttggcagtgccacttgttgaacggcaagatcaatgatctggcctttgaataatgtttcttccgagaggaccttttctgtataatccatctgctaatgccacctttaccgtttaatcgctattatacgcgcatttaaaatcgtccgccatcgtcaatgctaaattcaggttcacggccgaattaaaaatccatccttaggcggatactcttttaccttaattcctgttagaatgaaggcatcaattaaatcaggagctgacaattatgtttaaaaaaataacgatttggtgcacaggcatgctcattacacttgtctcaatcccaattttggcaacatgctttgatatttatggtgattgggataatttcatctggttcagccttggtttattattagggctgatctacgttacaatcagcctcaaacggcttaaacgacaaccagaatataaaaaagatcagcatatttcaccacaaatgctgaaacactaccaagatgctggcatgagtgatgacgaaattgactttttcagacaaacgatgcaacaagccgaagcgcaaattaaggtacttgcaaccaacatgcaagctcttcctaaattacgggcaatcgatttaaatcacgatacaaccaaggtcagccaatcgctttttcgtgcgattgtgaaagatccaaagcggcttcacaatgctggcgactttttataccggcacttaccatcaatcaatgaactgactagcaaatacatcgaaattaaccatcatgaagtcaagacagccgatacctatctcgttttagataaatcggctgcggcaattgatgcgcttagtcaacagattcaacaagactacgcggatttcgtggccgaagacgtcgatgacttagacacagaagtctccgtcgctcaacaacaaatcaccccagatcacaaggaggaagactaatgtctgaaacgcccaatccaacaaacgatttaatgaatgatttattaaaagatcctttcgaccaaagtgcgccagttgtcactgaggaagcatccccccaggcagaagcctcaattatcaataagctctcccctgaacaacaagcacaggccgaacaattggcacaacaactggacgtcaacgaccaacaagccgtcttgaattacggcgctcaagcccaaaagaaactcggcgctttctcccaaacaatgctcaaccaagtccaaagccaagaaacaggcgaaattggtgacgcattaacgtcattgatgtaccgtttaaacgaagccaatcctgacgaattacgcgccgaagacagcaacgttttcaagcggatgtttggcaagattaagaagtcggtctatgaaatcactgcgaaatatcaaaaaattggcgcccaaattgatgggattgccgttaaattggacaaagaaaaaaatgcattaatgcgcgacaatgagacgcttgaaacgttgtatgcgaagaataaagcctacttcgatgcactcaatatttatattgctgctggtcagttgaagattcaagaattagaaacaacgacgattccagaagccatggaacgcgccaaaaatgacgataatcaaatggtcgtgcaagaagttaatgatctcaatcaattcaagaaccgcttggaaaaacgaacttatgatttagaattagcacggcaaatcacgttgcaacaagcaccacagattcgcttgattcaaaataccaaccaagcattagctgaaaagattcaggcttccattaacacggcgattccactctggaaaaaccaagttgccatcgccctcaccctgctccgtcaaaaagatgcggtcactgcacaacgacaagtgtctgaaacgaccaatgacctcttgaagaaaaatagtgcgatgttgaagatgtcttcaatcgaaaccgccaaagaaaatgaacgcggcgtcgttgatatcgaaaccttacagaaaacacaaaatgatcttgttgaaaccttacaagaaaccctcaagattcaacaagaaggccgcgaaaaacgccaagtggctgaaaaagaactcaaccacatggaaaatgatctgcgcgaacacttattggcctatacccaaggtcaaaccgctgctaacagcggaccaaaagaagttaattaaatgtttaagtatgtcacacaacttatcgtctgtcaacaactatttttaattaattattacttagaagttataactccttaagcaacatataatatgttatcatgttttcaattaaataacaagtgtttttcaaaactttttatttaattgacgatactgcttatcactaatcagctcgcttttgacaactttattagtataccaacttgcaacccgtgatgcaaggattttctgtaaataaataataattatcttataacaataaaaaaaggcccttagctatactaggggccttcgtttttctactattaaacgtagaggtttttaacttgtttttgtaattccggatgtgctaagaactcatcatagttcgtttcagcacgttcgacaacaccgttcgctgatacttcaatgatatgatctgcaattgtttgaataaactgatgatcatgcgatgtaaagactaaagcacccttgaaatcgatcaaagcatcattcaatgaagtaattgattccaagtccaaatggttggttggatcatctaatagtaaagtattcgatttttgcaacataatcttcgatagaatacaacgcactttttcgccaccagaaaggacattgatttcttttgtgacttcatctccagagaaaagcatcttgcctaagaaaccacgtaagaaagtattgtcatcttcacccttagcggcaaattgacgtaaccagtctaagatgatgagttgatcatcattgaaggctgagttcgtatctcttggtaagtatgattgttgacttgtcacaccccaggtaactgtcccagtatctggctgcacttcacctgctaagatttgcattaagacagctgtcgcaacgtcatttcgtgaaacgattgctgctttttcgtctggcttaactgaaaagctgatgttatctaacactttaacaccgtcgattgtttttgaaacattctcaacccgtaaaagatcattccccaattcacgttcgaaatcgaacttaatgaatgggtattgacgtgaagagggttggatatcttctaatgtaatcttttctaattgtttcttacgagaagtggcttgttttgattttgaagcattggcactaaaacgcgcgataaaatcttgtaattctttgatttgttcttcttttttagcgttaacgtttgattgtaacttagcggctaacttacttgattctaaccagaagtcgtagttcccaacgaatgtcttgatgcgaccgaagtccacatcacacatcattgtacagacttggtttaagaagtaacggtcatgggaaacaacaatcacgatgttcgggaagtctgctaagaaatcttctaaccattcaactgaggcactgtccaacccattcgttggttcatctaataataggatatcaggtttgccaaagagcgcttgaccaagtaaaaccttaatcttttgcccttccatcaattcactcatcttcacatggtgtaaagattcatcaatccctaaggcttgaagtaattgagcagcttctgattcagcatcccaaccattcatttcagcgaattcagcttctaaatcagcagctttcatcccatcttcttcagtgaaatcagctttagcatatagggcatccttagcttgcatcacttcatacaacttcttatgaccttgaatcacagtctctaacacttcaaattcttcaaaagcgtagtgatcttggttcaaactcgacatccgttcattagggcccattgagatatggcctgatgatggttgtaatttaccttctaataattttagaaaagttgacttacctgcaccattggcaccgatcacgccataacaattcccaggtgtaaacttcaaattaacgtcttcatataacttacgcccagaaagcgttaagctcatttcactaacagttatcacttgattccctcacttttctttcatgactctaaaaagccaaccgtttcatgtgaaacggctggctttctaccattgacaatatatgcttaactctaacatatctaatgactagttatcaaccaggctatttgaccttagcaatcttaccttgttgaatatagacacttagaatcccgatatcggctgggttgaccccaccaatccgactggcttgcgcaagtgtttcgggttgaattttttgtaatttttgacgaccttctgttgcaaggccttcaattgcatcgtaatcgatattggctggaatctttttagcttccattcgttttaacttcgcaattttagctttttccttatcgatgtaacccgcgtatttgatttgaatttcaacttgttccacaacgcggttatcaatgccttcgactgctggaataaattggattaaatcagcatactttacttctggccgttttaagaagtcgctggctaaaacaccatctttaagtggtgcctcacccttagccgctaaaaaggcttggatttctggggttggtttcaagcgaatggttgctaaacgtgctaattcagcttcaacggctgcttttttcacttcatagctgtcaaagcgatcatcattgattaagcctaatgcatgacccttttctgttaagcgtaaatccgcattatcgtgacgaagcatcaaacggtattccgcacgtgaggttaatagccgataaggttccttcgtcccctttgtgaccaagtcatcgattaagaccccgatgtaagcttcactgcggtccaagatgaatgggtcgcggcccgtttgcttcagagcagcgttgatgccggccatcaagccttgaccagccgcttcttcatatcctgaagtgccgttcatttgaccggctgtataaagattttcaaccactttggtttcaagggttggttttagttgccatggttcaacgacatcatattcaatcgcataaccaggacgcatcatttgggcattttctaagccttcaatcgaatgaatcattttgtgttggatttcttctggcattgaggttgagaaatcaccgacgtaatattcttctgtttcgcggccttctggctccaagaaaatttggtgccgaggcttatccgcgaagcggacgattttatcttcaattgaagggcaataacgtggacccaccccttcaattacgccggtaaacattggggcgcggtcgagattgtcgcgaatcacttgatgcgtcgtatcattcgtgtatgtcatccaacaagaaagttggtctttcaaataagcactatcaggtgtttcgaaactaaagtggtttggttccttatcccctggttgttcttccgtctttgaaaagtcgatcgtggtgccgtccacgcgtggtggggtccccgttttaaaacgcgtgaggacaaatccgttgtcttccaaactttcagaaagtttaatagaaggaattgaattattcggaccagatgaataggttaattcgccgataataatcttaccccgagaagctgtcccagccgttaagatcacactatcagcgctgtaacgggcaccagtgttagtgacaatccctttgcagacaccgtcttcaacgatcaatgattcagcaatcccttgacgaagtgttaagtgctccgtcgtttcgatagtctgtttcattgtccggtgataagcgtgcttgtcagcttgggcgcgtaacgcgcggacagctggccctttacctgtattcaacatccgcatttgaatgtatgttttatcaatattgcggcccatttgaccacccaaggcgtcaatttcacggacgacaatccctttagcaggaccacccaatgatgggttacatggcataaaagccaccatgtctaagttaatcgttaatagtaatgtttcgcggcccattcgtgcagcagctaaagccgcttcagaacctgcatggccggcaccaacaacaatcacgtcgtagtgcgctgcgtcatattctcgcatattttgttctcctttaatatggttcaagacctatttacctaaacagaattggctaaagagttccgtaatcaattcatctggtgctgaatccccggtaatctcaccgagcttatcccaacagttggtcatatcaatttgcacaaggtcaactggcatcccagctgcaattccactgatgacttcatctaatgattgttgtgcttggtttaatagaccaatttggcgggcattagtaatcatgaccgtactttgactattttcaatcccaccgaagaagagtttggcgatttgggcttccaaatcggtcaccccttcgcttgttaaaattgaagtttgaattacttcatccgcattcaccaatgtttggagttcatttaagtctaacaagttcggtaaatcggttttatttaaaataatgatccgtttcttatcagtggtggccgtgattaactcgcgatcttcaaccgttagtggttcactttgatttaaaactaataaaatcaggtcagccttggtaattgctgcgcgacttctttcgaccccaatcttttctaccttatcttcggtatcatgaattcctgccgtatcaacaagcttcagcggtaccccacggacgttgacatattcttccaaaacatcacgcgtcgtcccggcaacatccgtcacaatcgccttatcttcatgtaataggtgattcaacaaacttgatttaccaacattgggccgtccgacaatggccgttgctaggccttcacgtaagacttttccttgttgtgccgtttgaagtagttcaccaatccgcgctttcacaagttcggctttttcaagtagaatccgcgtcgtcatttcatcggtatcatattcgggatagtcaatgttgacttcaacttgcgccaatacttctaagatttcttggcgtaaattcttaatcaggtgcgttaaactcccatctaattgatcaacagcaacttgcatcgcccgatcagtcttagcccgaatcagatccatcacagattcagcttgggttaaatcaatccgcccatttaaaaaggctcgtttcgtgaattcacccggttcggccattcgtgcaccatagctcattaataattgtaagatgcggttcgttgcgacaattccgccatgacaattaatctcaatcacatcttcgcgggtaaacgttttgggtgcgcgcatgacagacaccatgacttcatcgactactgcgtcggttttaggatcgataatgtgcccataattaatggtatggctcgccacttgatcaagatctttgccgcgataaacgcgtttaataatggctaaactctcatcccctgaaagacgcacaattgaaattgccccctcaccaggtggtgttgaaaccgccgtaatcgtatcaaattctgtgactgtcgttggcattttaaatgcttcctttccgaaatagctgcataaaaaaagcgcttagcgtccacccctcccgtcattgtgtaaggggtggacaaagcactttcactactttatcgatatttaattagtttcattatacacgatttttttagagcgtcaattcacaacacctaaaatgtgcgcgctaattccaccacaattgaccggcgatcgccttggccttctgaatgagtttgaacatggtgattagttgctaaatgcccatgcacaattttgcgttcaaaagccggcattggttctaaaaagactggtttgccggtcgcaacgacttcacgggctgctttatcggcaaggtggctgacaatcgctgctcttcgctgccgataatcaccaacttctaggataatggtttgcttgcccttcatatgatgatcaaagtaagtctgcgctaaatattggagcgcattaattgtcttaccatgcttaccaatcaacaagccttctttatcggtcttcaaatgataagtcgtactccgatggtcgtgagttacatgaatgctgaccggtgtgccaatttgagccgtgatggcttccaaataggcgcttaactcagcttccgtttccacaccacttttccgcttttgcggcgtactagttaaattgtctgttggcgttggttcaactagctcttgaactggggctggggcgctttgtttaacttggcttggttgttcatttggcgttagccggacaactgctaagcggcgaccaaaaccgagaaacccttttttgccggcttccaatacatcaacggacacttcctcacgcgttagatgcatagcttgcaacccttcatttaccgctgcttgaatatcgctaccttcatatgttggcatttcaaaacctccgatcaatttggtcactccaactagtgtgagcgcccgattctcgtttattataccatgatataccaatttaaaaatagcatgtcattatctgagatagtccgccgtcaaagctaggaattgttgtacatctttagcgatgctatccgcggcagcttgccagaaatccggttgggttaaatcaaccccaagatgtttttgcgctaatgcttcagtcgacatattggccgtatcacgtaatagtgcgatatagtccgcttcaaaatcaggcattgtctgtgccttggcataaatccccatcgaaaaaagatagccaaacgtataagggaagttataaaacggcacgtcatcgaagaagaaatgctgtttgtccgcccagaatagcggatcataatcagtcaacgcatccgcataggcttctttttgagcggctagcatgagtgcttttaaatcagctgttgtttgcaggccattttggcgcgctgtataaaaatgtcgctcgaataaaaaccgtgcgtgaatattcataaacatatcaattgcgttagtaattttctgatccaataaattaatcttcgctgctgggctttgcgctgctttaacagtcgcatcactgacgattagttcagcaaaagtggaagctgtttccgcgacgttcatcgcatagtcttgtcgccaacttggtaaatcattaatcatcattgtatggaacccatgccctaattcatgtgccaaagttgcaacaccattgggggtgccatcaaatgtcataaaaatccgaaaatcatccgtttcaggtaaatcagtcatataaccacctggttgtttgcctggccgatcttcagcttcaatccaacgcttttcaaacgcggtttgtgccaccgaagccatcttgggactgaacgctttaaagttctgcatgataaaatccgctgcttcatcataagaataacgctgcggttgaaaatcacctacaaccactggtgcccaggtatcataccaagcaagctgttctttgcccattaacgctgccttccgatttagaaaatcgacaagcggcgctttattttgactaacgatcgaccacatcgcttctaacgttgcgggttgcatgcgactcgttgccaatggctttttcaaaaagtccgttgtgccatgtgcttgataatccgttaggcggaagccagccaaatgatttaacgtatccgttaataatggtgaataccgatcccaagtctggtaccaattttgaaagacgcgttggcgtaccttgggatctggatcagattcaaatttattctgcgcttgtcccgccgataaagtcgtctcaccatcggggacttgaatttcagcaaccaatgagtcgtaatgatcactccatccagttaaaccatctaacgcgaactggttaattagtttttccgtcgcttcatccaaaagttcagcaccattcgtccgtttttcggttagattaaactgaatcgcttgtaaggcaggtgtcgatacaacggttttaaaatctgcgtctgacattgcgaccaatttttttgtgagtgcgacatcaatctgattcgcatcattttcaagcgcattaatccgccccatcatcggtgcaacttgcggattgcgttcatccgttgattgaatcatattcacgaaactccccgtttgcttgagacccgcttcaatcgcttgtaactgttcagtgatttgcgttagcgttgcaaatgttggctgatctgtcgcaaacgtccagttctggaccgcttctaataagggcgtcatttgtgcagtcaaatccgccaatcgttgcgtcaacgctggtgaatcaatccccccggcaaaaatcggttctaaatcccattgttctgaataggtcatctctttatcctccacttttaaacgattgcacttattatagcgaaatttcgcgcaaagcgcgattaattcaaccagatccactagacattttgataatatctgttaaattaggaatgtaagcagatacatagctgctagaaaggcgatgtttatgatgacgattgaacaagtacccgctaatacaatcgcagatttaaaaacactgttaaaaacgacccaagtgcccgataaaattatggcaatgggacccgaactgatccaatacttaacccatattaaggcgagtcaattatcagacaccgaccatcttgggttcgatttagggagtgccggcattttaacgttaatcgaacaagtcaatacagcctttttcgatcacttccatatgtttgacgatgctgcaccgattgaaccaaagttaacgcgtaaaattctagtgctttatcatctaaaaccgattgatgatcagcacttcctccttcatttgaaacaattagactattaaacagcaaaaaatcgtaaccaaatcagttacgatttttttattcttaaagatttttgaatgattattagtcttgaaattagttatcgattattaccaatcatgatgctactataaaattaagaaaacggtttaaaaccaattttaacaatttatctatctgaatttctattttttaatctagcgctatggaggattagccattgaaactatttctttttatattaacaacactcctttatttgctattagattatttaatgctaacctttccacctgtcgaaggggtggctcagaatgttcccctcatccttttaccattctgttattttttggatcccgattcttgctgagaaaaacaacgattaaccgccataaaaacgggttacttattggtgccgtttgtgtcgtctgcgctatcgcaattcctcttgtacttgctgcctattacctattctaaaaaagaccaatcataatgaaaattcattatgattggtcttttaattttggaaattaacgtttcttagttgctttcttacgtgctttagcaagtgctttttcacgatcacgcttttctttttccttggcttcgcgttcgcggcgaatcttaaatggattttgaatcaccattgtttgacccactgaaaaggcgttcgttaccacccagtaaattgaaacagcagacgcgatgttcatggccatcacaaaaatcatgattggcatcacccacaacattgcggatgacgcagcattcttcgtgggttgcgacatcattgttagatacgatgttgcaaatgtaaagatcgcagccaagatagccataataaagtaaggatcagctttcccaagttgcatccataagaacgtcccactctttaaagcagctgttcgatagattgcttggtacaaggcaatcaacactggcatttgaaccactagtggtaaacagcccacaactggattgacgcccgcttcagcatatagcttttgcgtttcttcgcgtaacttctgttgtgtctcagcatctttagaagcatatttcttttgaagtgcttgaatttctggtgcaacttcttgttgtttgagcatgctcttactttgccaccaagttaatggcaagataatcacccgaatgatgatggtgaaggccacaattgcccaaccataactgccaccaaagatgtctgctaaccataaaataaagcgggaaaagttataaataacataatgatcccagaagccagtactgctactatcaactggtgatgtactacaccccgctgcgattagcatgaacaagaatagactggccactaataatagccgtttgcgattttttgaactcactgtaatccctcacttattcagaagcagaatctgcttcttcctttaatagctttgctagttttaagacgtgcattaaattctgtttggtttccgccattgttagttggttagcgccacgtcttgcgatcactaaaaagtcgacagtctgtggtaactctggcttcaactccaacaagctctggcgaatgtaacgtttaacctgattacgcatcactgcgttacccacttttttacctacggacaggcccacccgaaaatgcttttgaccaggtttttctaattgataaaccacaaaattgcggttggcaactgaatgacctgcttcaaaaaccgtttggaaatcctgttcttttttgacgcggtacgactttctcataattcactccggcatttcatttaattaattgaggataataaaaaaaaccactgaagcatcagtggcctatgcagataatacttttctgcctttagcacggcgtcttgcaagtaccttgcgaccgttcttagtattcatacgtttcatgaaaccatgaacacgttctttatggcgtttctttggttggaaagttctctttgtagtcattatactggcacctcctaattgactgtgtctattgttttcatatctgagaaacaacgggtgataaataccacctacgacattcactaaaatataatagcatatttctatagaagttaaaacactttccataaaaaaacagaataaatattcttatccacaaaaaataattcattggctttcttgtggataactgattataccgaatcgtccgatttttgtcacgcacagattacttgctgatttatccagaaaatcacagggtgttactatgttatccacaagctattttcaagctgtgcacaaattgataaaaccttttaatagcaagcatcagatacacacacttttttgtggataagtgcgataatcgtttgttgttttctgttttccacagtccccactaaaagttatccccggtcgtgtgttcaagtggataactttttaattcattcctgtggattttgttcttgttgtggaaaacttttttttagaatgctagaatgtagatagtctttctttattgaactttttttcaataaagtggttattttacgtgaggaggacacgctacatgcctgatcttcaggaactttggaactatttgcgggaagaattccaaaatgatttaacacccgtcggttttaatgcttggattaaaaccgccaaaccgcttgcttttagagccaatgaaatactgatcgaagtgccttctcctttacacaaagagtattgggaaagtaacttggccactaaggtcgttgaaggggcctacgaattcgcagagattgaattgacccctatttttctgttacctaccgaagccgagcagcttcaagctgaaaaaccagctgaagaacgcagcctcaccaaagctgaaaccccaacctttttacgtgaaacgcatttaaatagtaaatacacgttcgacacgtttgtgactgggaaaggcaatcagatggcccacgctgcagcactcgttgtttcagaagaacccggtgttttatataatccactttttttatacggtggagttggtttaggtaaaacccatttgatgcaagctatcggtcaccagctgttactctctaaacctgacacaaacgtcaagtatgtgacgagtgaagcttttgccaacgacttcatcaattcgattcaaacgaagaatcaagaaaaattccgccaagaataccgaaacgttgatttattattggtcgatgatattcaattttttgcggataaagaagggactcaggaagagtttttccataccttcaatgatctctacaatgataaaaagcaaattgtcttaacatctgatcgtttacctaatgaaattcctaagctccaagaacgcttagtttcacggtttaaatggggcttgtccgtcgacattacgccgcctgatctggaaactcgaattgctattttacggaacaaagccgacacagaacgcctcgaaatcccagaagatactttgagctacatcgctggtcaaattgattccaacgtccgtgaacttgaaggttcactggttcgggttcaagcttatgcaaccatgcaaaatgctgaaattacaactagtcttgccgccgatgcccttaaaggcttgaaactcaatgggaagtcgagtcaactttcaattgctaagattcaatccgtagtcgctaagtactacagcctttcaatcactgatttaaaagggcgcaagcgcgttaaagaaattgtgctcccacggcaaatcgctatgtacttggcccgcgaaatgaccgacagttctcttcccaaaattggacaagaatttggcggtaaagatcatacaacagttatgcacgctcatgaacgaattagccaagctttaacgagtgatcaaaatctaaaagatgccatcttagatttgaagaataccttaaaaggctaaatataggctgtggataaacgctaaagttatcctaagagttgttctcaacttatccacaagtggaaaactagacactcttttgcttttctatgttatccacaggttccacaggccctactactattacttaaaattcttttataatatatatatctattttccttcggaggtttaacatccatgaaattctcaattaaccgcaacgtgttcatcaaaacccttaatgatgttcaacgtgccatttcagctaaaacaacgattcctattttgacggggcttaaattagtgctttcgcaagaaggcttaaccttaaccggtagtgatgctgatatttcaattgaagcaacccttgctagtaatgatgaaaagaatcaattagtcgttgaagaagcaggtgccattgttttaccagcccgcttctttagtgaaatcgttaaaaaattacctgaagatcaaatgacgattgctgttggtgacaacttccaaacaaccattcgttcaggtaaatcagaatttacaattaatggcttagatgctaatagttatccacatctacctgaaattgcgggacaaaatccgttcagtatcagtactgatgtgcttaaacaattaattcatcaaaccgtcatcgctgtttctaaccaagaaagtcgcccaatcttaacgggggttcatttggttttaaaagatggcgaaatgttagccgtcgcaacggacagtcatcgacttgcacaacgaaaattaaccgtttcagtaccaagtgatgggaactacgatgtcattattcctgggaagagtttaattgaactttcaagaacgttagcagacgaagttgaaaccgttgaaattcggattgctgaaaaccaagtgctctttaaagccggtaacttagccttttattctcggttgttagaaggaaattaccctgacacagcacgtttaattccaacttcttcaagtacacaaatcgaattcaatgcaccggtcttattagctgcgattgaacgggcatcattgttgtctcatgaaagtcggaacaatgttgtccggttgacattgaatacaacggacaacacggcaatcatctacgggaactcaccggacgttgggaatgttgaagaagcccttcaatttgaaaacctaacgggcgaagatctcgaaatttcatttaacccagattatatgaaggatgctttacgttcatttggtcaaacaaccatcgtgattaactttacggcagctttacggccatttacattggtcccaagtgaagatcaagaacactacattcaattaatcacaccagttcggacattttaataatcaaaaaacgccgcatttaaaaatggggcgtttttttttgcgctaaaattaaaataaattcgtttacagcgatttcggataaaacaagtaggataaggttaaagcacttaaaaacgctcagaaagcattttagctgtgtttatttgtttttaaggcaaaaaaagtctataattgtaaggtataacagatcggtattagcgcagtaattaatatcgttaagaatggtgggttgagtatggcacaagaaattaaacttgaagctgagtttgtgacactcgggcaactccttaaagaggccggtgtgattgaaacaggtgggcaagcaaaatggtttttaaaagaaacaacggttttagtgaacggagaacctgatgatcgtcgcggccggaagttatatctggaagacgtcgttgaggtgcccgataacggccagtttgtcattaaacaacaagaaagattgtaggcgactatgtatttaagtgaactccaacttgatcattatcggaattacgagcaagtggacgtccatttctcgccagatatcaatgtcttgattggtgaaaatgcgcagggaaaaacgaacttgctagaagccatctatgtgttggctttggctcgttcgcatcggacgaataatgatcgtgaactgatacaatgggatggcgaattcgcaaagattaccggcttggtacaacggcaaactggccacacaccattagaattggtggtcagtcaaaaaggtaaaaaagcgaaggtcaatcatttagaacaggctaagttatcccaatatatcggtcaattgaatgtcgtcttgtttgcaccggaggatttgaatatcgtaaaaggctcgccagctgtccgacgacgctttatcgatatggaattcggtcaaatgagtgcgaagtacctgtataacatttcgcaatacaagtcgattttgaaacagcggaatcagtatttgaagcaactacaacgacgtcaagctaaagatttagtgtatttaggcgtattgtccgaccagttagccgcttatggcgcggaagtcacggttgctcgccgtgaatttctgcaacagatggagaagtgggcgcagaagttgcatcaagagattaccaaagagcgggaagttttgacgtttaaataccaaagtcagattccagatgagcagttggtacttgatgccgaaggtttataccaacagtttcaaaccctatacgagtcgcaccaaacacgggaagtcgaacagggcacgacattggttggcccgcaccgcgacgacgtgttatttttggttaacggtaaggacgtgcaatcgtttggctctcaaggccaacagcgcacaaccgcgttaagtgttaaattggcggaaattgacctaatgaaggaacaaaccggtgaatatcccgtcctattactggacgatgtgttgtccgagcttgacgatttacgccaaacacacttattgaaaacgttccagaataaggtgcagacgttcttaacgacaactagtcttgaaaatgtcaaaaaagaaattattagtgcgccacgggtgtttaccgtgacaaacggcaccgtgacagtggccgatgcagcagcaaattagtcaaaaaacgatcaaacggaggtttttttcttggcagatgatcaaatgaatcaagagacagaagcacaaatggaagcaaaagaagaacgcgctaaatcttatgatgccagtcaaattcaggtgttagaaggcctagaagccgttcgtaaacgaccagggatgtacattgggacaacgagttcccaagggttgcatcatttggtttgggaaattattgataatgggattgatgaagcactcgctggttttgcaacagaaatcaacgtggttgttgaacccgataatagtattacagttacagatgatgggcgtgggattccagttgggattcaagctaagactggtaagtctgcgctcgaaaccgtctttacaatcttgcatgccggtggaaaattcggcggcggcggatacaaagtatctggtgggttgcatggtgttggggcttcggtcgttaatgccttgtcaacggaattagatgcggttgttactcaaggcggtaaacgctactacatcgatttcaagcgggggaaagtgcaaacgccaatgaagatgattggtgacgcaccagcccatgaacatggtacgaaagttcattttgtccctgatgctgatatctttactgaaacaacggtgtatgatgataaaattttaacaacgcggattcgggaattggccttcttaaacaaaggcttgaagttaacgttcaccgacaaacgggctgaaacacatgaaaaacttgaattccactatgaaggtgggattaagagttacgttgaatatttagacgacaaaaaagagacccttttagacgaaccaatctatgttgaaggtgaacaaaacgggattaccgtggaagttgctttgcaatatacgaatgattatcggacgaacttgatgacctttgccaataacattcatacctacgaaggtgggactcatgaatctggctttaagacggcgctcacgcgggttattaatgactacgcaaccaagcaaaacatcttaaaagccaacgacacgaacctttctggggaagatgtgcgtgaaggcttaacagcggttgtctcggttaaacatccggatcctcaatttgaaggtcaaacgaagacgaaattaggcaatgccgacgcacggacggtgactgatcggatgttctctgatcatttcacgaagttcttgatggaaaacccatcgattgcccgccaaattgtcgacaaaggctcattggctgccaaagcccggttagctgctaaacgcgctcgtgaagtgacacggaagaagaacggtcttgaaatctcaaacttgccaggtaagttggccgataatagtagtaaagatcctgctatttcagaattattcatcgtcgaaggggattccgctgggggttcagcaaaatcaggccgttcacgtttaacgcaagccatcttgccaattcgggggaaaatcctgaatgttgaaaaagctagcatggaaaaaattttggcgaatgatgaaatccggaccttatttacagcaatgggcactggttttggccaagaattcgatgtggctaaagcccgttatcataagttgatcatcatgaccgatgccgatgtcgatggtgcgcatattcggacgttgcttttaacgttgttctaccgttacatgcgaccaatcgtcgaagcgggttacgtgtatatcgcacaaccacctttgtaccgtgttaaacaagggaagatgatgcgctatattgattctgatgaagaattacaagaagtgttagggacgctccaaccaagtcctaaacctgaagtgcaacgttacaaagggttaggggaaatggatgctagccaattatgggaaacaaccatggatcctgaaaaccggcgcatgttgcgggttaacgttgaagatgccgaagaagcggatcaaatttttgaaatgttaatgggcgatcgggttgaacctcgtcggattttcattgaagaaaatgccgtttacatggatccaaagagcatcgatgcatagcgtgttcgccgcttaaacggacacattgaaagactgactgagaggggtttatagattaatggcaaacgaaattggccaagacggtcggattgaaaacgtcaatttatctaagacaatgcgtaaatcattcctggaatatgcaatgagtgtcattgttgcgcgtgccttaccagacgttcgtgatgggttaaaacctgttcaacgtcgaattttatacggaatgaatgaattagggatcactcccgaaaagccttacaagaaatctgccagaattgttggggatgttatggggaagtaccatccacatggtgattcagcgatttatgaagcaatggtgcggatggcacaagattttagttatcgttacatgttagtggatggtcatgggaatttcggctctgtcgatggtgatggtgctgccgcaatgcggtacaccgaagctcggatgagcaagatggctgtcgaaatgttacgtgatatcaataagaatacaattgattatgtaccgaattatgatgagtcagaacgcgaacccgctgttttaccagcccgtttcccgaacctactcgtcaacggggcgactgggattgccgttgggatgacaaccaatattccaccgcataatttagccgaagtgattagcgcattacacatcttgatggataatccagatgcgacaaccgctgatttgatggatgccttacctggccctgattttccaactggtgggttagtgatgggtaaatctggtattcgccatgcgtatgaatctggtaaagggacaatcacccttcgcgctaaagtggacgttgaggtccaaaagaacggcaaagaacggattattgtcactgaaattccatacatggttaataaggccaagttggtcgaacggattgctgaattagcccgtgacaaacggcttgaagggattaccgatttaaacgatgaatctgatcgtgatgggatgcgcatcgtaatcgatgtgcgtcgggatatgagtgcttcagttgtcttgaataacctgtacaaattgacaccattacaaacctcattctcatttaatatggtggccatcgtgaatggtgcccctaaagtcttgagtttgaaatcaatcttggaacactacttagtgcaccaagaagaagtcattcgtcggcggactgaatttgatttgaagaaggccgaagcgcgggcgcacattttagctgggttacgcattgctttagaccatatcgatgcgattattcagatcattcgtggttcgaatacaggtgatgccgctaaggtcttgttgatggatcgttatgatttatcggataaacaagcgcaagccatcttggatatgcgtttagttcgattaaccggtttggaacgtgataaagtcgaaaatgaatacaataatttgatgactttaattgctgatttgaaagatattttagccaaaccagaacgcattaagaagattatctacgatgaattgcttgaactccaaagtaaattcggtgacaaacgccggacagaattattggtgggtgaagtgcttagtcttgaagacgaagacttaatcgaagaagaagacgttgtgattgcattaacgcataacggctacattaaacgattaccagccagcgaattcaaagttcaaaatcgtggtggtcgtgggattcaagggatgggcgtccatgatgacgacttcatcgaacacttgctttcgacttcgactcatgaagtgctcttattcttcaccaatactgggaaagtttaccgtgccaaagggtatgaaattccagaatatgggcggactgctaagggaattccaatcattaacttattaggcattaattctgatgaacgcgttcagaccgtggttaatgttggtaaagaagtgcaagacgaacaatcactcttctttattacccgcttagggacggtcaaacggacatccgtttctgaattcgccaatatccgtagcaatgggttgaaagcattgaccttgcgggaagaggatgaattaagtaacgtcttgatgactgatgggcaacaaaatatctttatcgggacccataatggttatgctgtgtcatttagtgagacagctgtccgttcgatggggagaaccgctgctggtgtgcgtgggattcggttacgtgaaggcgactatgtggttggctctgacttactgattccgggtcaagaaatccttgttatctctgaaaaagggtacggcaaacggacaccggttgcagattacccaatcaagggtcgtggtgggaaagggattaagactgccaacatcactgaaaagaacggcccattagctgggattgctgccgtcactggagaagaggatattctcttaatcactgatactggcgtcttgattcgtttcaaggtcgctaacgtttcacaaactggccgggccacacttggtgtgcgtttaatccgggtggatgacgaagcgaaggtcgcaacaatggcgaaagtcgaagctgaaccagatgaacctgaaacaccagaagcaacgacggcaccaatagcaccaactgatgacactactgatactggcttagcacaagtcgatgaattactcgcgcgggctgaagccgatcaatcggcatcagatgatcaagattcagaaaattaattaaattaaaaaaataaaaatcgtttctgcgtaaatacacttgtaacaactgttaccaagcgtgttagcagcaacgatttttattttagattgtattttaacggccgttatgatagaattttatcttgtgagtatctgtgatttagacacagggtctaaatcgtgaggctaatttttattagtcagttactccttgttcttacacaggtaagaacctaaagtccataaggaggtgaacagtcatggctcaatcaaaatatgaagttacttacatcatctcaacaacacttgatgaagaaagtaaaacagctcttgtcaaccgttacgacggcatcttaaaagacaacggcgctgaagtgattgattcaaaagactggtcaaaacgtcgtttagcttatgaaatcaacaatcaacacgaaggcatttaccatatcgtaaatgttttagctgataatgatgaagctttaaacgaatttgatcgtctagctaagattgatggctcagtattacgccatatgatcgttaaacgcgaagactaattttgaattgtaattattgaatagaggggagctgacagaatgattaatcgagttgtactcgttggtcggctaacacgcgatgttgacttacgttacacttctagtggtgctgctgttgggactttctcaatcgcagtgaaccgtcaattcacgaatgccaatggtgatcgtgaagcagactttatcaactgtgtcatctggcgtaaatcagcggaaaatttcgctaatttcactaagaaaggctcactagtcggagttgatggccgtctacaaacgagaaattatgaaaaccaacaaggtcaacgtgtatacgtaaccgaagtggtcgttgataacttctcattgttagaatcacggacaacaacggagcaacggcaaggggatggcgcaagccaaaactttaacaacaatcaaagcaatggtagccaacaatctggatttaccagccctcaacaatcgggtaatccatcagctgcaaataacactcaagccgatccatttgcaaataatggtcaagcaattgatatttcagatgatgatttacctttctaaaataaactgttttggaaggaggaactttcaatggctcaacaaagaagaggcggcaaccgtcgtcgtcgtaaggttgatttcatcgctgctaaccacatcgaatatatcgactacaaagacactgatttattgaaacgttttatctcagaacgcggtaagattttacctcgtcgggtatctggtacaagtgctaaaaaccaacgtcgtttgacaattgcaatcaaacgcgcacggattatgggcttattaccattcgttacagaagactaatcagtcaaccaaaagacctgctaaacactgtttagcaggtctttttttgtgcgctttaataggggaacatgggattaaattacgggttcaaagcggtaattgtagggcaattgtgctaaaataaaagtagcattttttaagttttagtaaagaaccacatagactcaatgatagatgaacaagaatcagaatgggatctagaattaaggagtttacatgaaaaataagtttaaacaattaaaattaccacagtttttagatgatactcgcctgcggaccgttgccctgattttgttgggccttacagcggttagtttggtatttgctgcgatgttagattggctaattgctctaattttattcgtgctgctaatcgggacggtcattactgtgctatacgcgatcgaaacggtcactgagaatacagccaagtatgtctcggacttgtcgtaccgcattaagcgcggcgagcaagaggctttaattaagatgccaattgggattttattgtacaacgaatcaggtgagattcaatggacgaatccttatttacagcaatatttcggtaataaagaagttttaggcaaaaagattaagtctgtcgatccagagttggcagaattagtcgcacaaaatgaagatgctaatgaaacaaaaattgttcgttggggcgataatcaattccaaatcattatccaagaaagcattggggtggtttatcttctcgatattacacgctatgcggccattgaagatcgttatgaagatgagcaagtagccatcgggcaagtgttcttagataattatgatgaaattactcagacaatggatgatcaatctgtttctaatctgaataactatgtcaccaacgagttatcacgctgggcgaatcagtttcagatgttcttgaagcgagttgatgatgatcatttctttgttttggcgtacgccaaatcattacacgccgctgaacaagagaagtttaagattttagatgaaattcgagaagaaacatccaaacaaaacttcccactaacgttgagtgttgggtttgcttatggggaatccgatttagccgttctagcaacaacttcacagagcaatttggatcttgccctcggtcgtggtggtgaccaagtcgttgtcaaagcgagtgaaggacaagcacgtttttatggtggtaagactaatccgatggaaaaacggacgcgggttcgtgcacggatgatttcacaagccttacaagaaatcttcaaacaagttgacgaagtctttgttatgggccatattcggccagatatggatgcattgggcgcctcatttgggattcgccggattgccgagatgaacggtaagaagtgctacgtggtcgttgaccaaaacaatattcatacagatattcaacgtcttttagaggaagttaaagcctaccctgaaattgcagtggaagtgttgtcgcctgaagaagcgctcgaaaaagcaacggccaatagtttattagtgatggtcgatcattctaaaccatccataacaatggcgcctaagttgtacgagaagcttgctcagcggacgattgtcatcgatcaccatcgtcgtggggaagagttcccagaaaacccaatgttggtttatatcgagccctacgcctcttcaacgtgtgagttagtgacggaaatgtttgaatatcaaccacaaaatgtcgctaatattaacaagttcgaagccacaacgatgttggctgggattacggttgatacgcagtcattttcaatgcgaactgggacgcgaacgtttgacgcagctagttatttacgttcagttggggctgatgcttcgatggttcaacacttgttaaaagaaaatgtcgataattatattcaaaagaatcatttaattgaaaccattgaaatggttgagccaaatatggcattatgtatgggtgaggacaaccgtacctacgatccggtcatcgcagcacaagcagcggataccttgctgtcattgtcagacattgaagcctcgtttgtcattgtgaaacgcccagatggcatgattgccatttcagcgcggagtctaggtgatgtgaatgtgcaagtgattatggagaaattaggtggcggtggtcatctttccaatgcggcaacgcagatggcagatacgactgtttccgaagccaaggcgaagttattaacggttttggcagagctatttgatccggaaacggacaaggaagcaacaaacgattaattagataaggtggtcagaacaatgaaagttattttcttagaagatgtacgcggtaaaggtaaaaaaggccaagtgaaagatgtgccagatggttacgcacaaaactttttaattaaaaatgggaaagcaaaacccgcaacatcagctgctatcagtgctttaaaaggccaacaacatgctgaagctaaaaatgcagctgctgaattagcggaagcaaaggttttaaaagccaaaattgaagacgataaaacaatcgttgaaatcaaatctaaagcgggcgaagacagccgcttatttggttcaattccaagcaagcaaattgcccaagcattggctcaacaatatcagatcaatgttgataaacggaaaattgatttaccagaaccaatcaaagcgttgggttaccggaatgttgatgtacggattcaccctgatgtaacagctacgattcgtgtgcatatcgtaaccgaataataaaatgaatgattgaaaagaccgtgattagcaccactatcacggctttttttattgctgaccaatcggtgactgttgccagtcactggtattttgagtaaactagtgagtaattgaagtcgattaaccaaaggagtaaaaatggtgaataatgaactaattgaacaagtaccgccgcagaataatgaggcggaacaggccgttttaggggccgtctttattagtggcgatgcgctcgttgaagcaatggaatacgttactgccgacgatttttatcgtaaagcccaccgtttgatcttcgagacgatggttgaattaaacgaacggggtgaaggaatcgatgcggtgactttaaagagtgccctcgatgcgcagaaccaattggaagatatcggtggtattggttatttagctgagttggctgaggctgtaccaacggcagccaacgtagtttattatgccaagattgtctctgaaaaagcaatgctgcgccgtttaatccaaaccgctcaaaatattgtggcaaagggttacgcgcaagatgaagacgtcacggatattttagataccgctgaaaaggaaatcatggatgtttccgaacggcaaaataaggccgggttcaaatcaatttcagatgtcttaacgagttcaattgaacaaattgataagttatatcaaaatgaagaagacattacgggtctatcaacgggataccgcgatttagataagattactgcgggtttgcatgaagatgaactcattattttagcggcccggcccggggtggggaaaaccgcgtttgtcttaaacattgctcagaatatcgggacgaaaaccaatgagaatattgcaatttttagtttggaaatgggtgctgaacaactcgttaaccggatgttgtgtgcagaaggaagtattgacgccaaccatctaagaaccgggcaactcgatgaacttgaatggcagaatctaatcgtagccatggggagcctttcaaaagcgaatatctatattgatgatacgcccggcgtgaaaatggcggaaattcgggcgaaatgtcggcgcttagcgaaggaaaaagggggcgttggcttaatcgtcattgattacttgcaactaattgaaggttccggccaagaaaaccggcaacaagaagtctcggcgatttcacgtcaattaaagaaattggctaaagaattacgggtaccggtcattgcgctctctcaactctctcgtggggttgaacaacgacaagataaacgcccagtcctttcagatattcgtgaatcaggatcaatcgaacaagatgctgatatcgttgctttcttatatcgtgatgattactatcgcgatgaacctggggaagatggcgatgatttcggtggtggcaatccgccagcaccagcgccacagcagtcagatgatgcggacgttggagaagttgaagtgattatcgaaaaaaaccgtgcgggtgcacgagggacagtcaaattattatttgtcaaaacgtttaataagttctcatcaatttcgtatgcggaccaatagtaatgactatttttaataaatagtgaatattatcgtaaatgaaatacttaaaaaagccatcataattaaagtaaaaactttaattatgatgatttttttgatgggcatattaactgatattcgttaattagatgacaataatgggagggagaaatagaatgataacatcgttactttagttttatgagaatattctaaagatatttaaaaatttatttatatccaaaaatagttaatataatgcgaatctatagtgaatttcaattaatattaacattgttttccgtggctatggatggcattgttgtgttaagcactgaatgggcaactttttaccaaacacttgcgcaaactccgattacgattattgctaatgcggttgaactacctaagcaatacaaataccatagtcagtctaaacaaattatcacactggggcgcttaggcgaacgtaagggcacctacgatattctaaaattagcaggggtgattcaatcccgttttccggatattcaatttacgttgtatggtgatggtgaacaggggaaggtccagcaagaaatagaccgcctaaagttaaccaatgtgcgccttggtggctggttagctttggcggatcgcaataccgttattcaagaaagcctgttacacctattgccctcatatcaagaaggcttaccaatggcaattttagaaacgatggcttatggaattcccaatttagctacgaatgtcggggacattccacaagtaattgagaatcatgtgagcggggatttggtgacaccaggagatgacgctggcttagttcaacaactcagtgattttctaggtagtcagatgcgacgtgaaacatattcacgaaatgcccggcaaacgattaacgactgtttctcattgcaccagtattttagccggtggcaccagttttatcaaaggattatgaatgaaacggaggaggaatgatgaattctatagcgcaatcgactgataaattagagttgattaatttctatcatgagatggctcaaatttcagcaaacattagtcaaatttcaaatgaagacggagttaccatcgaacaaattcgtattttacaaacattaaaacgctataaaggtattaataatagtaagattgcacaagtattaaaaacatctaccgcagcatcttcaaataaattacgtaaattagaggatcaggggtatatcagcaaacaatatggcaaacaggatgatcgtcgaattgttgatatagcagtttctcccgctggagaatcaatttatcgtcgatttgagcaggcgtgtggaacttacattaaaagtattactgaatcagataagaaaattagcatgccagaattaatgcagctgtttgaaatgacaaatagacttgctagaagtattcggacaactgaaattgaatagacaaaaaagtgcccacaaacggttaaatttgtaggcactttttttgatttatttttgttcagcatgttttgctgcaattaatgaacgatagttgaatagtaagtttaagatgacagcgctgagactgccgactactaagccgttgcctagaattgtgcgaacactcgttggtagtgattggagcaaggttggatgaattgctacccctaagcctaagccgattgaaacggcagcgactagtaagttgcggttatcatcaagatcgactttgtgtaacatcttaatgccttgaatcccaacagtgccgaacataacgaccatcgcgccccctaaaacagcgcttggaataatggttgcaacggccccaatcttaggtaataatcctaagatgattaagaagaatgctgagtagtaaactggttttttcgttttgataccggataattgaacaatcccaacattttgtgagaacgttgagtaagggaaggtgttgaacaatccccctaagatagcggcaatcccttcagcgcggaagccccgcttaagatcattgctagtaatgtcgcgcccaacgatttcaccaagggcgaagaagacaccgattgattcaatcatggtcgttaacgcagccaatgacattgaaacgattgatgaccattcaaaacgaggtgttccgaagtagaataattcaggtaatttgaaccaacttgcttgacctactggatctaaggacacaatcccaatcgcagctgcgattaaggtcccagcaataatcccaattaaaatggcgatttgttggatgaagccacgcccccagatactaaaaatcaggattagggcaatcgttgaaaaaccggtaattaagtttggtgtactcccaaacgacttagcagcaacatcgccaccgcctaagttttggaaagcaacgggaatcaatgtgaatccgattaatgtaatgagagaccctgtgacaactggtgggaagagccaacgcaaacgtgcaaacaagccagaaactaacaagatgaaaattccggcgccaataatactaccgtacataacgtcaattccgagttggctgttagtgccgatggcggctaacgggccaacgtactcaacagcacaacctaggacaaccggtaatgcaatcccggtcagtggggttcgttttaattgtaatagggtcgcaaccccgcacatgaaaatatcgactgaaacgaggtaagtcatttgagcggcattaaaatgtaatgcagccccgacaagtaatggaattaaaacatcgccagaatacattgctagaagatgttgtaagccgagaatcgctgctttaatgtggggaagattttcatttggattaattggctgtgctgaatttgagtgtatatctgccacgagtgtccctccaagataattgttaaaatttagttaacatttagtttagcacacgccaatagtgacttcaattagaaattaagtaaaaaacgaatataacattcttaaataatcgcgatagttcgcctttgtgatgatgcacaccaactgttcgatgacaaaagtgctttcttactgaatgattcgcttgaaaaaggcgataattgttcttaaattaccgattattatgtttcacatgaaacgataatctgaaaactgggaagaatcttgtttttttagggtaagtacgttaaactaaaaggtatatgtgaaacaataatgttccacgaattaaacgcctactttaaagcatagttaaggagaaataatgacaccatcgggttttgcagcaacgttaaaaacatacaatattcaagtttcacaagcacaaatggatcagtttgaattgtatttcaaacggcttgtacaagtgaaccaacaagttaatttgacagccattacagaacaagaagcagtttatctcaagcacttcttcgattctgtcacaccaactttgtatcttgaaaaactacgcactgaaccccttacgatctgcgatattggtgcgggcgcgggttttccatcgttaccaatcaaaattttattcccgcaattgaagattacgattgttgattcattaaacaagcggattcacttcttagaagaattggtccgtgaattaggcttgtctgatgtgacattggtccatgatcgagcagaactgttcagcaacccgaagagtccatatcgtgaacagtttgatattgtgactgcccgggccgttgcttcattaaatgtactggtagaattctgtttaccaactgttaaagttggtgggcagtttatcgcattaaaagcgagtcaaggtgaaacggaattggcagaagccaactatgcaatcgaaacacttggtggccaatttgcacaagacattgctttgacgctaccagaaacagatgatcaacgacatctaatcgtaattgataaggttgtaccgacacctgccaagtatccacggcgggctggtgtgccagttaaaaaaccgttaatggctaaggaggaaaaataatggcactctcattttttaataagaaaaaagacgataaaagtattaatcaagtgatcaaagtgccggtttcagcaattgtgcctaaccggttccaaccacgaaaagtatttaatgcggacaatatcgccgaattagcaagcacaatcgaacaacacggcttattgcaaccgattatcttacgtgaatatgaagatcaaaaatatgaaattattgcgggtgaacgccgttttagagcgattcaaaccctcaaatgggctgaattaccagcgattgttcaaactatggatgatcacgaaacagcttcaatggccttgattgaaaacttacaacgcgaagaattaaccgccgttgaagaagcacaagcttataaggacttaatgaagctgaacgacttcacacaagccagcttggcagaaaagatgggtaagagccaatcttttgttgctaataagttgcggctattgaaactctcacaacccgttcaagaagccatcatgaatcatgaaatttctgaacgacacggtcggagccttttacggttggatgaattcaagcaacaaatgattttacaccaaatcttggctgaacaattaacggttaaggatacggaagcgctggttaacaagacgttgaatcctgaaccagaatcaactgaagagacagttgatgcaaccgatgacagtttaaaagaagctaccacgaaggctaaaaaagcgaacgataaagcaaaaaaagcaattgcccatgatacacgcattgccgtcaacaccatcaaaaagtcggttcaaatggttgaacaaagcgggattgccgtcaaagccaccgaagaagaacaagatgatgtttatcggattacgatcgaaattccaaagcaataagggaggctcattatggcacacgttatttcaattgcaaatcaaaaaggtggcgttggtaaaacaacgaccacgattaatctaggcgcttgtttggcggatgctggcaatcacgtgttaatcattgattcagatgcacaagggaatgcgacaagcgggattggggttcaaaaatcccaagtcgaaaaagatatctatgatgtgttggtcgatgaattcccactaaaagaaacaattattaaaacatcacataagaacttagacattgttccagctacgattcaacttgcaggggcagagatcgagctaacatcacagatggcgcgtgaaatgcgcttgaagttagggttagaaccagtcttagccgattatgattacgttttgattgactgtccaccttcattagggcaactttcaatcaatgcctttacggcaagtaattcaatcatgattccagttcaaagtgaatattatgccttagaaggattgagccaattgttaaacaccgttcgtttggtgcaaaaacattttaacccaaacttagcgattgaaggcgtgttgttgacgatgtatgatgcgcggacgaatttaggggctcaagtgattgaagaagtgcgtaagtattttggtgatcgggtttacgacacgattgtgccacggaatacgcgcttagcagaagcacctagtcatggcgtatcaatcattgattatgatccaaaatcacggggcgctgaagtttaccaaaatttggcaaaggaagtgttagcagctcatggcaactagaaatggaaaaggattgggccgcggtttggatgctgtattttcagcgttcgaaggccctaataaaaaccgggcggatgaattagttgaagagattgcacttgatgatattcgtccaaatccctatcaaccgcggaagacatttgatgaagcggctttggctgaattagcagcgtcaattaagaagtcgggcgttttccaaccaatcattgttcgcaaaagtattaatggttacgaattaattgcgggtgaacgccgattccgtgcgtctaagttagctggtaaaacagcgataccagccatcacgcggcagtttgatgaatccgcaatgatggaaattgcggtcttggaaaacctgcaacgtgaagatttaacgccgttagaagaagcccaagcttacgatacactcttgaaaaagttaaacctgactcaagctgaagtatcagaacggttgggcaagagccgcccatacattgccaattacttgcgcttattgggtttacccaatgacgtgaagacgttattacaaaatggtgacctttcaatgggacaggcgcggacgttattatcattgaagaaaaaaagtcagattagtgcattagcgaaacgcacgattgatgaaggcttaacggtgcgacaactagagcagttaattaaccagatgaaccagattaaagctgcgaaagtgacgaagaccaagattaaatcaccctatattcaagcgagtgaaaatcaattggtcgataaatttgacaccaaggtcaatattgcgattaacagcaagggtcgcggaaagattgagattgattacagcacagtcgatgatttaaaccggattcttgcattgctagatgtgaatatcgattaaagtgaggagtcgagctagatgtatacattaggcgatcttgttcagatgaaaaaacaacatgcctgtggcaccaatcgctttgaagtggtgcgcttggggatggatattcgaattaagtgcatggggtgcggccacgccgtcttattaccgcgccgtgaattcgaaaagaaacttaagaagaatttggtgcctgcagcacaagtcgttgttgcagatgaaccccactatcaagagatgcaacaaggtcccaaccaaactaatttttaaagtaaaggaaagtgtaaaaaactatgtcattaaccgcaggaattgtaggattacccaacgtcggaaaatcaacgttatttaacgccatcacgaaagcaggcgccgaaatggcgaactacccatttgccacaatcgaccctaacgtcggcatggttgaagtccctgacaagcgtttagaccggattcaagaaattatcccggctaaaaagatcgtgccaacgacttttgaatttacggatattgctgggatcgttaaaggggctagcaaaggtgaagggcttgggaacaagttcttggagaatattcgtcaagtcgatgcgattgtgcatgttgtgcgcgcttttgacgacgataatattacctctgttaccggaactgttgacccgttagacgacatcgatacaattaaccttgaattgagcttagctgatttagaaagtgttacgaagcgttatgcgcgtgttgaaaagattgcgcggacgaaagacaaagacgccttagccgaattcgaagtgcttaaaaagattaagcctgttcttgaagaaggcggctcagtacgttcaatcgaatttaatgaagatgaagcgaagttagttaaaggcttcttcttattaacatcaaaaccggttttatatgttgcaaatattgctgaagatgccatggctgatcctgatagtgtggattatgttaaacaaattcaagcgtccgcagctaaagaaggcgccgaagtaattgccatctcagcaagaactgaagaagaaatcgcctcattagatgatgccgataaggctgaatttttggaagccgaaggggtgactgaatcagggttggataaattgattcgtgcttcatatcatctactaggcttagcaacattctttaccgctggtggaaaagaaacccgggcatggactttccgtcaaggcatgaaggccccacaaaccgccggtgtcattcattccgactttgaacgcggatttatccgggcagaaacagtttcttttgctgatttagatcaatacggttcaatgcaagctgttaaagaagctggccgtttacgtttagaaggtaaagaatacatggtcgaagatggcgacatcatcgaatttagatttaacgtttaatgataattgaggaggaagacaattggctaagaacgaacaaccagtagtaaccccagaaccagttgatattgaagggttagaagcaaaactcagtaagaaaaatgcggactatttatttaagttcaaacgcgcattaaatgccgaacaagtgccagcagaacgccaaactgaaatcttggcagaaatgttaccagaaatggtagcagaacaacataagggcaagcctgcaacacaagtatatggtccagtgacaaccaagattgatcaattgttgcacgcgccaaaacgtcctaagcaaacatcacttcaactccaaatgcttgataacggcttaatctttttaattatgtacctagcctttaacggaattgcggcttatttctcaacgaaggggtcagcaaccagcattgggattacatcaattgtcattacggctgcgcttgcagggatcatcatgacttatccaatgcgctatacgcaaatgccaaaagaacaacggccaccattttggaagatggcattggttgtaatcggcttaacactagcctttgttgcggcatacggtgtgacaatcttggttccaagtttcttgaatccagtcttgccaccacttgttcaaatcgtaattgcagcactcttaatcggcgtgcggatttatatcaaacgccgttttaagattacaggttcattcttcggttaatattacccgggaaataaatggcaattgaggaggatttgagatgattagcactgaagaacggcaaattggggcagtcagtacgttgattgtggccccaagtggtcaagaaaaagcggtattaccaactgtctttgtatatcatggttggacgcaccgtaaagagtcagaattaatggtcgcccactttttagccaaggctggttttcgcgtggtcttaccagatgcgaagtatcatggtaaacgacatggtagtcagctcttttctgagttaatgtttgaattttgggatattgtgatgcagtcggccaccgagtttggtgaactggttgcaacactgagcgctgaaggcttagttgatcctgaacggattggtgttacagggacttcgatgggtggcattacaaccgatgcgattctcacccgatatccgaatgtcaaaattggcgttgataagattggcgcaccaatgcctgttgcacttgctaaatggcaggttagtcaattaccaacggccttacaaaccaagtatcaagatgcgattgaagataccttagcacggttagcggcgtatgacttatcaatgcacgttgatcacttggcaggtcgtccattgcatttctatcatggaactgctgatacgatggtgccatatcaattcacggcagattttatgaccgaaattcaggcgcaaccaagttcagccaccgcattagtgacattgacgacggaagaaaatgggcaacataaagtatcagacgatgcccagctcaaaaccgttgaactgatgcaacagtacctactttaaaaatgagaaaagccgccagaacgtaaattgttctggcggcttttttgatggggacacaaaaaaaccagccttggggagactggtttctagcagatccgaagatctaaaaagaagtaaggggtacacgtattactttgggggaataatacgtgcgtggtagattgcgtctaccttaattttactttggaggagtaaaatgaaaaagttaagtagtatgaaatagaaaagattcgcttttctatactcaatactataatgggaatttgtgaagattttgtgaccagaggtttatagatttatgaaaaaagcaataaggaaagtttaagggtcaaagagtatgctaaaatgaaggtactttataagagatcgagagatgattgatatgacaaaggggaccgttttatttgatttggatggaacgatagccgattcgcaagaaggcatcgtgaacgccttggaatatatgattgaggagttatcattgccgacgcaaaccaaagctgaactggtcacattcattgggccacccctcaatgaaacaattatgcgtgagtttggtttaaatgcagctgctactcaagaagctattaaagtctttcaagcctattatgcgcctaaagggttgtatgaaaatcaactttatcctggcatgcgagaaaccctagcggcattgcaagcacaggatttacaactggcaattgcgacttcgaaaccagaaccattcgctaagaaggtcattgatcatttagagttaggcgattactttagcggtgtttttggagcaagtgttgatgagacaacgcgggtcaaaaaagcggatgtcattacttacgcattatcagaacttggtctagcaccacaaaccgcaccattactgatggtgggtgatcgccaaaatgatatcttgggcgctaagcaaaacgcgatgaatgcagttggtgttagttatgggtttggcacaatcgcggaactcaaaaaggcgggtgctgtccaaattgtccaacaacccaccgagttaatcacatcattaccggctaatcttaaattttaggcatgctgttgcgcgttagcgaccattaaggtataaatccgcgcgacatctttcgcattgccacggagctcataatcggcgataaacggtgcatcgaattgtaccgcataccgtttagcagttaagcaatattgttcgttgaagttgcggttcccgctaccgattactccataacaaaggcgtgcgttctgcgcataatcgatgtattcgcctaagctattggtcattaattctttaacgccattatcaatgccgttgccaccatctaagtaagttggaacgaacgcgtaaaacggttcggtctccgctttaaagggggtcgcatccgaaatttctgtgagggtaatggttggtaacgctgggttattagcatgttgttgcgccgcataatcctgtaaatccgttacaaatgaacgtgtattaccagcaattgaaatatagagaatcgttaaattttttaacattgaatggcctcctgtgactgataagttcactttagcatttaatgattaagaatcctagtcttgaagtttaatagggttcgtgaatagaaagggtgtttaatcaatggaaccaattagtcgtttgaatcaaaatcaaccaagcgtgcgaccacatcggggtttaagtcgctttttgacgttcttaatctttctttgcgttttcctcggcattggtggcatgattctcagcctgacagttttgagagaatcatttacgcaagaacagctcagtgaaccgaagacgttagctgcgatgactgataaaattaacgttgttttattagatgcggcacaaaaaaatgggctaccaactgaagtacaagtcaaattactgactcaatctgatgtgcaggccgatttaaagaaaactgttcataatatttatacaggacaagaaaagccgttacccacagcacaaatgatgggacagcttgcaactcatttagaagcagttgtgcctgaaaatgcgttgacggaatctttaattaaaacggcagtagttgcggttcaaccaccactacaagaatacctcacgaaccaaattgaagcaccttacttagcaccactagcgactaagatgttgtttgttagaaatgtgatcaatatcttaacctgggttgcaattattatgggaattgttcttgtactagttcaatggggactaagtggtcaattccggtatgtattagggagtgttggtgcaagttttgcttggagtggcttattcttggcactaggggcggctgcgtttaaatatagtggcattgttgaacaaattgctcaaaaagcgggcgattttaatcaaacaattaccgactatgggttggctgttctggattatggtttgaagacaagcacgattgttttaattggcggggcgattgtctggttggttgcaacgcttctccaaagagtacgacattaaaaaagatgacctttgcgggtcatcttttttaatagggcgtaatcacgatttcatggttcaagtagttagccatgtagatttgttgaagactgtagccttgctgttcaatatcggcgaggagccattcttcagtttgatcgattaattcaagtgcttctgaattaatctggccgtccataatcagcggatatttaatcgtggcgtcgcctttttgcgtaatggttaattgtccgttttgttccaagattgcgcgactgaccgtgcgaatatcgctaatcccggcaattcggagtttaaacgacagatcctgtgcggataaactattcttagaggccgtttgaatatcaatgtggccgttggtgataattgtttggggattaccaattacccagcgtttaatccagcgattgtgagtggttagaaacttcattgtgaagacgattaaggtccagatgagtaaaacgagtaagaattgtaagagcgagatatcgacattataaatcataccgccaacaatccccccaagaacgtaattttggagttaatcaatcccactgctaggggctaaattccccttgccagagaagttgatttgtaacactaaacagaagaaaccgaaaattaatttaatggtaatatcgaaataagatggcatagtaaactccttaatcttgataggtgatgtcttggctaatcaactgagctttttggagttgataactagtaaaattgttatcaaatatgacttggtagttttgatgaccgacgcgcactaccatgttttgctgaagcgaagtcgtgttgactgcgacggttttaaggctagctttctgcgcagtcgccacacttctaatgaattgcgccatctgagcttgttgcgagtgggcggtgttaagctgttgaatccgtgtatattgaatgccggcgagtaaaatcccaactaagccgaagatgattagtaagtcacggtacttcgaatctgaacggtggcggagatattgaacgaagaagatgatgattaaactggcgatgatcactgacagacttagtttgagatagaattcgaaatcattctgattgctaaagtatgaataccgataaaaaagcataatgacctccttaaataaacggttaagcctattgtagcacaccggctgagcagatagattgtgtcaaatttaaaacggcggtagactgaaagcatgaaagggatgattgatatggcattaaaaataacacctgcagcagttgcgaaaatcaaggataagatgacaccgggtcaaaaaattttattggacttagatgacggtgttggtccattttcaaacgttggttattgctcgttggatacgaactttagattgctattagtaccagcggatgctgacattaaagattatccagatgaatttgaatcaaatctaggggctgtttactacaaagattatgcagctggctactttgatgaacatgaagtattagacgttaacgaaaagaatcaaatgttaaccttgagtaataacagtggcttaattgatgggcacatctccattgtcgtatttgagaatgaatcaatgactcattaataactgtggcgtcgggcagaaagtggtccggcgttttttgttgttcatttgtactttatccacattggtgggataatgacaaaaacagttttattgaggagcctgacatgaaaacagcaattgtgactgatagtgcggcgtatttagatccacaagttgccgccgaccataatattactgtggtcccaatcaccgttatttttggacaacaaacttatttggaaaatatcgatatcacgagtgaagcattttacgataaaatgcgcactactgaaaaattaccaacgacttcgcaaattacaatgggtcagatgcaacaggtttttgatcaattgataaaagcgggctacgatgaagtgatttgtatccatctttcaagtggcattacgagctttgtcaataacctaaccgcctacgcacagtcggttgaaggcatcgaagtgtatccttttgattccaagattacgagtgccggtgaagggttcttggccttggaagcggcgcggttagttgcccaaggtgaacatgccgcaactatcatgccgaaattggtagctttacgagcaacgatgggcgtttatttcgttgtggatgatttaagccacctcttgcgaacgggccggatttcgaatagtgcggcctttgtcgggaatcttttgcggattaaaccgattttaagttttaacgatgccggccaaattgttgccttaacgaaggaacggaccaagaaacgggcctttcaaaaagtattagcggatttcaaagcagcagtcgaatctgttgactatcccgtacgcgttagcgtgattgacggtaataatccagaagaaagtgtgcagtgggtcgcaacgttgacggaaacattcccagggatgccgattgaaacgagtcacattggtcctgtggtcggcgtgcacaccggcgaaaaagtaatggggctcatctggagtcgtgattatttagcataacgaaattaaaaaacagccttgcgcatttgcgcaaggctgtttttgtttaaatgtgtgctattagccatctccttgtggttaatcctcaggagatggctgatagcacactctttttttaattggtttcaataattgtattgttggctgtattattttgtggttcgctggagacttcaaaccagtcgatgtaaccgcgattgaattcgaccacttttaatgtgaattgattgatatgaatgaccgcactttgttgtaagtcggtgaagttttctaagacataaccggccagggtcacgctatctgaggcttcgaaggcatcaattttagtcttgaagaaacgttcgaaatcatagagcgtcgttttcccactaacacggtaacggttatcgtcttctttgatgatgtattcatctgaaacatcgtcaatttcgtccttgacggtcccgaatagttcttcatagatatctttatcagtgacaatcccactcgtcccaccgtactcgtcaacgacgaccacaattggggtttgcttattgatcatttgattcaacaaactgtgaataggggttgcttctggaacggagataatcgaacgcagtaatttgctgacgcggattgaatcgtcgacttgtgcctgacggactaaatcatatgcgtagacgtaaccaagaatcttgtctttatcattttcagcaaccactgggaagcggctaaagccttgttgtaagtagtcttttaagacgtctttaacggtatcggtgatatcgacgacgtagagacttgtgcgatcaaccatcacatctttggcaatccggtcattaaagtcaaaggcccgttgcatgtaaactaaatcgttgcgatctaattcaccaccagtgacggcatttttagagaggctaatgatttccgcttgggaaagcacatcactaccttcttcagcaggtgaaaagccgattaatttcacaacacccgttgcggaaatgttgagtaaccaaacaaatggatagaagataatatgacagtaatggaggggcttagcaacagccatcaacatctgcattggaatatcaatactaatattcttcggcacgatttccgtgaaaaccacttctaaataggttaagactaacacgccggcaactgcgccgatgatgtgtaagccaccatttgaaatcaggtgagtgagaccgagcagatcgactaggatggtttcgacggttgattcaccaatccaccctaaaataatcccggcaacactgacccccacttgggtggttgagagatattcgtttaagttttgcgtcattttaagcgcaagattcaattttttaggattaccatttcctgaatggatggcatcttctaaggcacttggccgtgtttggacgagcgcaaattcagcggccacgaagaaggcggctaaaaagaaggtgaccaacataacaaatagattagtgaataactcaccacttgacaaaataattccccatttcttaactaactagttctattttaccattctcaagcttaaaacggtaaataacgtcgggctttagtccgattttattggattcaataataatgaaaataccataatttagggaagaggtaaactaaattgttaaatatctaaactaaaatacgctttgtcacattttgacgttgatctgtatcgaaaaaagccactgtgttagtggcttttaaacagttttagaatgttgcagtatcaggatcttgcgcgtgtccaacgacgccgtcaagtgcatcaattgcagccatgtcttcatcggctaattcgaagtcgaaaacttgggcattttgttggatgtattcagcatgcacagacttaggtaatggtaagaagccgtgttgtaatgaccaccgtagtgcaatttgtggaattgagcgttggtatttgtccgctaattcttgcatttctggcacactgaaaatcttcccagtcccaagtgggctataagcttctaataacatgccatgttcacgtgagtattgggcagtttcaggttctaattcgccaggggctaagaagagttggttgaccattggttgtaccgttgcagtctttttgagcgcttctaaatggcgaacacggaagttgctgaccccgatggcccggactttaccagctttgtagagcatctccattgcacgccatgtttcggcgttggctgtttcccaatcatcacggtaggcaattgggttgggccagtggattaggagcaaatcaacgtagtcggtttgtaatttcttgagtgattcttcaaaagagctgattgttaaatcataagtgtgattactattccagattttggtggttaggaataaatcggaacgatcaacgccactagcttggatggcctcaccaacactcccttcattaccgtaagcttgggcggtatcaatgtggcgataacctgccttgagcgcctcttcaacagcagctacggctgtttgaccgtctggtgtttgccaagtcccgaagccaattttaggaatttgcacgccgtttgtgagcgtgtatgaactcgttaagttagacatattaaaacactcctttatcagtttaaaatctctacttacagtttacttgttttcgatagagatagacagaaaaccgacttattccccgggaaataaaatcgatttgtcataagctgagcaatttggcctgaagtgcgggatcaacagcatagaggtaaaggccgtttctagcgcggctcattagaacgtagaggctattaagaataatttgctgtttcgcggcttcaggatcagccagctgtgctgcgccggcaaatgcggcttggtcctcgtaatattcaggatgaataactagccgctcactttgtggatcatacgtgacggatggcccgatgatgacgccggcatagttgagatcaaagccttgaatggtgtacacggatccgacttcatctatactatcttcacgttctgcccaataggttttagcggttggctgataccgatcccagcgtaatttgaatgtcgatgtctcaacgaagtgatcgtgaccatcattgagtgttgctggaaaatcgtaagtagctagcatgcgtgcaagcccactcgtttggtttttaaagcgaatcgtttgatagagctcattggcatcggtgaatattttgaattcaaagtgtggatcatgtggcagggcagcgacttgttgttgatgaaaggtttgcacccaattttcaacacttggatgggcttgcatccgaaattgatgggttagttgcgcggtctgatggggagcagcttcaattcgttggcggagttgttgctgttgccagaagctcttcactttaagcacttgctgttcatcaaaaatcagaatggtgatccgactgtgtcggcgaatttcatcgagttgatttgtttgattgaagtggctataggggtcggatttggttaacagtaggtgtgcctcatcaacgaggacgatatcggcaagttggtggtttttagccgcttgattgatgaatgtcgttgggcgttgaaaatcttttttcaataaaacgggggccgttgttgtgccacttttgtagagttttagcatttctggatgattgaccaatagaacgttttgactgccatagagtggcgaggtgggtgtttggcgcgcaagtgtctgcagtaccttgaagacactgctgagaatcacgctcttaccagtcccggccgcaccttgaatcaagaaggtggcgtgttcggcgtgcgcgtttgccaaacaaaattgaatgacttgttcttgtagtgcttgttgttccgttgttagttggttggcgggacgattgagtttataaagcgcgctattttgacgctgtgcatttggcaaagtgaggactcctgttcattcatttcaataaaaaaagccccagtagatgtagaaataacatcgcctggggcagtcgtgctaatcgacaaaaattagttggaattcatgttgcactaaatcgagattgacggagacgtggcggttgagatcggccacaattttacgcgctaatgttacccgttcttcgaagcttgtggcaagtgccgcgaattcagtttgtttaaagttgtagttttcagtgataaaaatcgcgtctgtgacatataacaggttattttcatcgtgacgagaaccgctctttaaaacggcatcgatataatggtaaagctgagtaggggcaaagttcaatggttggtctaaaacggttgtaatctgaaaatcaggtaaatcgtcaaccatttgtgtgtttagtgtgacttgggttaatgcttgatacagtttcatagtgacaccttcctaatgttgagatttaaggtcgtgcttgtggagcttctaagtggcgttgaataaagcctaacgtcacatcagcgataatggccatcagggcggttggcagggcaccagctaagattaaggcgccgccattagtggcgttggtcccgcgaataatgatgtcgcctaaaccgccggcaccaacaaacgcgccaatcgctgtaatcccgatggcgaccactaaggcattgcgaatccccgccataatgacggccaatgataagggaagttcaaccatccgtaacagttgccaatttgtcatgcccatcccgattccggaatcgataatattatcggaaacattctccataccggtgtaagtatttttgataatcgggagtaaggagtataaaaagacagtcgcaatgacggttcgtgtgccaagccccaagccaagcataatgattgagagcattgcgagtgaaggcactgtttggatgacattcgctaccccaattataacattactgagctttttccggtgcgcaataaaaatccccaagggaatgccaatcaacgcggcaagtaaaacgccataaatcgaaatcaaaaaatgctgactaaactgccgtaaaacataactgccattatgctggaaataatagacaagttgttgccaagtatttaaattagtcatttagcggctcctttccggaaataattatgttcctgaagaaattgttttgcgactactgcgggttctagtagatcattatcaactttaaagttgagggtttgcatggtgtcgaggtcgattttgccatctagacggtgtaaaaggggcgctagtgctggctgttctttgagaatctgatcagtggagaccacgctcgcatcgtatggtgggaagaagcggcgatcgtcttttaagacttttaagtcataacttttaatccgtccatcggttgagtaacctaaaacgacgtccattttaccagccgccagtgcgctgtaaaccagtccgatttgcatgggcgcaactttcttgaaatcatagccatacgtttctttaaatgcgggatagccatcgccttcgtgatttacccagacggaatcgacaccagctgttagttgatccgccacttttccgagatcactgacggtttctaaatgatatttcttggcggtttcctgggtgaccataaaggcataggtgtccgcaaacccgtaggaagggaaccatgtttggttgtaacgatctttgaaagcttttttaacgattttttgggctttttcaggatctttagtaggtttcatttttaaagtaccagtaagttcagttccagcgtagcgactagcagctatgtcggcgtcaccacgaattagtgattcatgcgttaccgttgaagaacccagattattaattaaagtgaccttattttgtgtttcgtgggtaatcaactcgctcagaatattggcgagaatttgtgactcagtggtgcttaaagagctaatgcgaattgtttgtgattgacggtttccgatgccaagtgactgacagccacttaacaggaggagactgccaactaataatccgcaactcgtaatgaatcggcgtattttatgcataggagcctccttatctgattacagcgggggtcagttgtttttccaaccggcccaagccaaaatcgactagcaatgctaacaatgtgacgggaattgtcccgccgatgattaaatccggtttgaaaagattcaacccgttgaaaatcaagtcgccaagaccaccagcgccaatatatgaagcaagggttgcccaagcaatcacgtaaaccgcagataggcgaattcctgccataatcacgggggtcgccattgggatttccacttgcataattgattgtaccggcgtcatgcccattcctttagcactatcttttagaatcggatcgacatcgttcatgccgatgtaggtgttccgcaaaatagggagtagtgagtagataaataaggcgatgattgctggtactttgccaatcccaaagagcggaatcattaaagccaatagtgccaatgaggggacggtctggagcatgctggcaatggcaatcactactttggcagttttaggaaatcgggtgagggcaattccaaggggcaccgcaactattatgcccagaactaaggcgattgcggaaatgtagagttgttcccaagttttaatcagtaaatcagagccatgttctgttaaaaaagtgagcatcatcgattcctccctttctattgttggtcggattctgcttcagattcgtcagtatcaccccagacagcatcataaacgacatcgactagggctgtccgagtgacaatcccaacaagttgatgatcatcgttgataacgggaacgtatttccagccccgtttaagaatccgttcaatggtatcccggaccaaatcattttcgttcacgtaactaatcttggtagacataatgtcaccaacactagttgcgtctttgtaatgatggtcgatattttcaatatcgacgagtccctttaaatgttggttttcgtcgacaaccagtaaggtatcaacgcggcgttggcgcattaagcgaatcgcatcaactaatgatttacctggtgtgatagcgactggacttttaagcatgatttggccaacagtttcgacatttggtttggcttcgatcaaacgatcgtgaccgattaagtcttcgacgaattggttggcaggatttcgcaagatttcattgggcgttcccatttggatgatttggccattatccatgatggcaatgcgtgacgctaatttgagtgcttcatccatgtcatgggtgacaaagacgattgttttaccgagttctgattgaagttgttttactaagtcttgaagtgcctcacgcgtaattggatcgagagcaccaaatggttcgtccatcaaaataatatcttgtccagctgcaagtgcgcgaatcaccccaattcgctgttgttgtccacctgataattggcttgggtaacggtctaaaaagtccgcaggcatttccactaattttagtaattcgagcgcctttgcatggcgtttttctggggaccattttaagagtttagggacaattgtgatgttatcttgaatagtcatgtgtggcattaagccaatattttgaatgacgtaaccaatttttcgccgcaatttaacggggtctacattagcgagattttcaccatctaaggtaatcgttcctttggttgggttaatcatgcgattaatcatccgcatggttgttgttttcccagaaccagacgtcccaatcaaacaaatgaattcgcctttgtcgacagtaaaactgatgtcatcaacggctttgttaccaccgcgatagagctttgaaacgtgatcaaacgttagataatgtgtcataaggaacctcctattgtgatgattggaaatttattgctatataataactatgttagatacgtaacatgcaactgtcaatgaatacgctttactgataggtatcaaaaagccggtgtaacggaattgagaacgttacaccggccattaattaacctgttgatttaggacgataaagaataaagtgggcgattaaagcgagacattgataagctagcgctaagagacaaacggcgacccagccaccgaagctccaagcgagggcgccaaagaatgaaccggaagcaccacccatgaaataggcaaacatgaagacggtattgttgcgactactagtggcttcaccaagcatttggacccgggtttgattggcaacctgaccgcactggtttccgacatctaataaaacaatcccgagcattagaatcggcatgaaatgcccccagaataagaataaaagataactgatggtcatcatgaataagccagtggcgataataaagcgaggtgatttagcatcggctaagcgaccgataattggtgcagctaaagcaccagccgcaccaaggattgctaatagaccaacggtaccactaccgagacgataggcgggactggccatatagaaaatgagtgtcgaccagaaaatactaagtgtcccaaacatgaaaaaaccgttgatggcggcttcccgtaacagccgctggtgcgcgataagccctggaattgaactgattgtctgccagtagcttggcccgttttttggacgggaatccttaggtaatttgagggctgccagaaggattaaaagcgcaatcgcaattgtagcgatgagatacacccaacgccaatgaatgtaactactaataatgccgctaaagcttcgggataggagcacacccattagaagaccactgagaatggtgccgagcactgcgccccgtttttgtggttgagcgaggacggctgcatatggaatgatgatttgaggaaccactgaggtgaggccaatcatcaaaccagtcaaggcaaagaaaatgaaattgggtgctaggtaagcggctaataaggatagtaaggataagccaagcatccgtaatatgagctggtaacggctcatcacatcaccaaacgggacaatcagcaacaagccaagtgcataaccgacctgtgtcaacattgcaacagtcccgaccgcaccacttgtaacgtggaaagtggtcgctacgagtgcttgaatcggttggatgtaatatagattggagacggcaacgccggtaataaaagccatcaaaaggattaatggctgcgtaaggactgttttttgcggagcactttctgacatactagggtggacctacctctctgaataacgttcttttagaatttgaagtgcattgtcgaattcaacttgggcttccggttcttcttcacgctttgcggctgtttctagaaagtctaaaatttcaggcgtgacatcgcgcactaattgactgagcgcccaagcagcagtgccgcgaatgacagggcgcggatcagtatcgatgagttcgagtaacttcggaatcgcggtgcggtctttcacgttggcgagtgcgataatcgcattgcgttgaagtggctttttgccacgccacgaaccagcaaggtgtccaaattgaagtttgaactgcttgttactgatggttagcacgggctgtaattcgggcatcacagattctggatctggctccatatcaggatggaagtggaagtcttttcctttattaaacggacatacttgttggcaaatatcacagccgtaaatgacactgcgaatttttggtctgaattcttcgggcatgaaccctttggtttgtgtttgataggataagcaacgcttggcattgaggcggccatcgcccattaatgcctgtggtggacagtaatcgatgcagcgcgtacagctgccgcattgattggccatcggtgtgtctggttcaaatgggatgttggtaatgatttcaccaagatagacataagaaccgaattcgggtgtaattaataaaccattcaaaccgatgaagcccaacccagcacgttgcgcaacagccacatcgctcagttcgcctgtatcaaccattggcttaaaagtaatttcagtatctgaatcagcaagtgtttcgatagcgctgatcagctggtccatcttatcgcgcagaatatcgtggtagtcaatcccccacgaagcgcgggcaaaactaccgcgtttagcaccagttcgcgctggcttattgatgatttttgttggataggcaagagcaatcgcgataatcgatttaggttggtcgaaaattaaatctggataaaggcgttcttcaagcactttatgttcgaatccagtcgaatgaccatttgctttttgttccttaagacttgcttctaaataatcaaaaggcgctgccgatgtgaaaccaatcttatcgatgccgatggttttgctcgcctcaatcacttgttcttttaaagtgggcattcaaagccacgctccttttttaagtttcatgtgaaacaaatgggttatgctaaataaattttgcgcaggtcagctaagtcgtgttggcttaactggagatcgtgtgataaatagtcttgcaacgaaccattttcggattcaatcgcttgtttggcggtatcgaggtaatcttgatgaaccgttagtaatgactgataacttttgaacacagactggttctgtgttttttgttgtagttttgcaagcgattgggtcacgaaagcggcagaagcttgattcgttaataagtaatctgtgcgaatcgtttcttctggaacaccgagtgcactcaacaagaaaacagcgcccatcccagtacgatctttaccagccgtgcagtgaaacagtaaggattggtcctccttatcgtttgctagcaacaagtcgaaaaattgccggtaagcttgcttggagtgatcttggttaattaagtcgacatagacttgaatcatatgttcatgaccactttttggatcagcactgaacgttttaaaaagatcagcttctgatgccgtactagccgtttcatcaattttgaaaacgggtaaggattcatagattgcattggcagggaccttgtctggtgacttggcagtttcttcaggtgagcgaaaatcaacatcatagcgcacgccataatcagttaaataagctaaatcatgtggtgttaggtgggctagactagcggaacgtaagactttatgccatttaagggtccggccgtcttttgtttgatagccgcccaattctctaaagttatggcctttttcaagtggcaaaatgcggtgtgtcatatgcgtcaactccttatccaatgataccaatattgtagcatatttaatgggcaatcaacttaacttgtcagtatgtggggagaaacagtatgataggggtattaagagtggagtgagcagatgattacgtattttgaaatgacacctgagggccagttggttgaaggaacctctgaaaaaagtgccgactggattcattttgaagcaccaactaaacatgagatgcaccatttcgctaaaaaataccacttaccagcggtgttatttgaggtggcccaagatatcaatgaagtcgcacggtatgaaacatttacaacggacaccggtgaagtattgacccatatttgtttactggtaccagttaaaacccatgattcagaagatcatgcggaatatattacgcggcctttttcgttaatcattagtggccagacgttattaactgtggggcatcaacagtccgagctcatcgatgaaatactcacgttagaaggcctggatggtcaaattgaaacggttgctctaaagagtgtttcggccatctatcaacgttatttagcggctttagcggtcgttgcgcaacagattgaacaattggaagaaaatgtacatgtttcgacacgcaatcggttgttgtatgcactcaagtctcttaaaaagagtgttgtctatttggatttagggcttaagagtaaccagcaaattattccgcaaattaaggcaagtccattatttgagcgcgtgtcaggacatacagacttactgtatcggattgacttgcagtttgccaagtccgataaggcgattacaacgtatcgtgagttattggcacagttaagtgatttgctttcagatattatttcaaaccgattgaataatattatgaagacactaacatcactctcaattattctaacggttccgacaacgttaggtggtttctgggggatgaacgtaccggtcccgctagccgagagtaagttagggtttctcgtgctattaggattgtcattagccattagcctttgtgtcggttggtggttaaaaaagaaagactacttctaattaaatgttcgcggaagcgcttcgcttttttgcttgaattgtttttccaagcggtatattcttaaagtgtaacaggtgcatatagagaaagtgagatgaacaacatggttcaagaatataaaagaatactcgtcccagttgacggctctgaagaagctgaattagcactaaataaagcagtgtgggttgctaagatgaatcaggcgcgcttggatattttgaacgttttggataccaagcaatttgcagggagttatagtggcatgctttcaggagacgctattttccaaatctctgaagatgcacagaattatctcaacagtttaaaatatgatatccaaaccaatgacggtttaaaagatgtcgagattcatgtgcggtttggtaatcctaagaatgttatcgcacgcgacttcccgacagaatatcaaaccgatttaatcatgatgggctctactggcttgaatgcagttgaacggatgttgatgggttctgtgacagaatatgttaaccgcacagctatctgtgacgtgttaatcgtcaagactgatgttgaaaatcgcccttatcaaaaagcaagtaagaaaaaataaataacaatcccaaaggctaaaaaggatgaattctttttagcctttttgcgtagttcaatttaggaggtggtaataatgacaaaagctgattggatgtatgattcacctgaattattggcgtattaccaaacagagtggggaaaaccggaacatgatgaccaacgcttatttgaactattatgtatggagttgtatcaggctggcttgagttggcggactgtattaaataagcgtgctgcctttcggacagcatttaaagactatgaaattgccaaagtagcacagatgacaccaaccgaaattgagcagttactgaccaatccggcaattatccgcaatcgtgctaagttgaatgcaacggtcaataatgcacaagccgtccttgcgttacaaaagagtgcaggaagctttgatcagtatctatggggctttgttgatggacagccaattgtaaaccggccccgaacttgggcggatgtccccgcaaaatcagagctatcgatccaaatcagcaaggatttaaaacggcggggctttcaatttgtcggaccagtcgtcatctattcattcttacaaggagctggcgtaattgatgatcatctgatgtcacagtaactttttggtgcagtcagtcgcgctaatattgcggatggtgtattatggagggatagaattcatttagattaattaaaggggtcccacatatgacacaggataatgttcgccaattagcagattggttagaagaaaacatggcagcaattgccgatcgcaaagtgcaattaaatccagaaacaatttttgctgttttggatgattttggcgttttaaataacccggtcgttaagtattttgatattacagaagaaacatattatcaatcagagtcagatcataaattaacgttatcagatgaccacaaattattaatcgatgtgaccgatcggattatggtgacccacgtggatggtgttttagctgaaaacaaagtcaactttgaatacagccacgaagctgtttatgaagatcaatatctcgttaaacgcgatttagaagtgttgacatatggtttggctgtcattggtgcagtggctgcaaccgttaaacataacttaatccaagctgatttgtctaaagatgctgtgttgagtttagctttggctgcgcaaaacatcgctaattggcaagcaaaataatccagtaaaggttggcaagttaaatgggagcagtgctagaattgcgtgatttttcgcaaaaatatcagcggcgacaactttttaaacgtctcaatttacggattgatcggcaagcttgtatcgcgattactgggcaaaacggcgcggggaaaaccacgttgcttaacgtactagcaggattgacgaatattgaacgcgggacactggagattgcaccgaagatgcggattggctatatggctgaacaactcgcaccaaatggactgacacctaagacttatttgcggatgctaggagaattagatcagtttagcaatcgaaatttagaaggtcagattaatgaattagcctatgaatttgggttagcggcggcacttaatacaccgttaaatcaattgtcacgcggtagtctgcaaaaagtgaactttgtgcaggcgattttgcggaccccagatattttattgctagatgaaccgttggctggtcaagatggaacgacccagatgcggatgattcattggttgaaagactaccgccaaaaagggggcgccatcattgtcggcactaacaacgcttttttaatcgaacagttggctactgaaatttatgaactagatgcgatgcggctattgccgattgaagaattaccgcagccggaagaaaaggtgatgcggttagaatttgcaactacaccgcgatcactcgcacttcccgctactttacaacagttagctttaaaaattgttgatggtacgcggtacgtcgtcttgtatgcaaatatcaaaaatagtgatgaattaattcaagcaatgttaaaaagtggctttagcctaagggggttacgttatgaagtcctttagtgcacagttacgtttgcatcagaaaatggtttttgataatgggaatttgtgggggcctttgctattttggatagtggccttattagtcaattatgcggtgcaaccacaagatttcgtcggcagcctcgctacattattaatgacactgtttatcttattgacgtggttgacctacagttacatcaatcaatttccccttcaaatggaaaaacttttaattttaaaattaaagaagcaacgccgtttttatctcagtttaattagctatctcatcttgttgggattattctttgtcctaattgggatgggaagcttggcaattacttacgtgctcaatgggcaccacgcttttggtcgaggacttagctggtgggattggctaggcgggaccttaatgttgacgagtattttacctgtttcagtaatgaccggtttgttctggcaacggcgaattttagtgaatcgccggatggccggtacgttgaccatcttgatggtggttctcggcagtttaggtgaagcgattgtcaattactggcatccctacctctatattctggggattttgccacccgtttcgaccatggcgcaactcttcaacacgttgggacacatttcgctagttgatattttattatcatgggcaatgagtcttggttatagcttggtcttattattgattgatcaattaattttaagaaggcgtaaattcctattttaagaagctgataggctgctataagcggtttgacagcttctttttaagttgaattaagcggttacgggtgaaaaaatcttaaaaatgtggcatgattaaaaagaattcaaatcataaaaggagcttttataatctatgacaaaaattgcaatcgctggctcaggcgcaatgggcagtcgttttggttacatgttacaatcagctggaaatgatgttgtgttacttgataattgggcagaacacgttcaagcaatcaataccaatggcctgacggttgtagaagcggggcacgaacccgttcaggttcgaattccggctgctttgccaacggatattaaagaagttcaagacgtcattattttattcacaaaatcgatgcagctagtcgacatgttacaagccatcaaacccttaatcggtgctaagacaaaagtagtctgtttattgaacggtctcgggcatcccgaaacgattgaacaatacctgcccaaagaaaatatttttgtcggcattacactttggacggcggggttaacgggaccaggtgcgattacattaacaggctctgggaatgtcgaattacaaaatgttgatccagatggcaaagaatcggcacaagcattagttgccttgttgagtgcggctggcttaaatgcgcaatatagttcagatgtactcttttcaatctggcgtaaagcctgcgttaatgggacactgaacagcttgtgtgccttgttagactgtaatattgcacaattgggccaaaccccacaagcgcaacaactcttgcgttcaattgtggcggaattctcagcggttgctgcaacagaagccgttgaattagacattcccacgacgattgcccacatcagcaagatgtttgcaccagaacaagcaggtggtcattatccttcaatgcaccaggatttagtgcaacatcaccgcttaaccgaagtggattacttaaatggttacgtggcacgcaaaggcgccgaaaagcacattgcgaccccagtcaaccaattaatcacggaattaattcatgccaaagaagcattattgattaaataaacgaggagtcttaactaatgacagaaaaacgccaattaaatatcgaagttgaatcaatgcactatcaaaaattattaattgctatcgatgatgatgacacaacctcatccaaacgggcctttaactatgcttgtacgcttgctaaggcctatcaaattccattagggattgtcagcattttggaaaccggcgatttgaacatttatcaatcactctcaccaaacgtggttgaagggcgccgagaagaaatcgcagccgatctagatgtttatgttcaaaaagcgaaagaattcggggttgaagatgtgacgccgattttaaatgaaggtaatccaggacacgtgattgttgaagaagtgattcctagtttccaaccagacttggtcatctgtggttcaaagacgaaaccatctaaacatttaatcgggacacatgcgagctatttagcgaaatacgcgccatgttcagtcacagttgtacggtaaattaagtatttggagatcagacgaatgatagaatgtacacaatgccatattaaatatgggcgtaaattgcaccaatgtcccaattgcggtctagtgcaccaatcaacgcaaacaaaacagcaaacatcgctcctgcaacaatactatcaatttttagcgcggagtttaaaacaaccgctaaaggtgcaatggcagtgggccaacctgtggtttggcttagtcacgtttggtctggttatattaatgaatactgcaacggcaagtttgctcattgccagttggtcagaacaaattggtgcggttgctggggtgatggcgtcacaaattgtcttgcgccaacggctaaacttattaccgcttgatatgaaggcactcggtggacaactatttattctggtggttgttttgggaatcggctttttactcaagcgttacttattgaagaagacgacaaccaccttgcgcgcgtatctaacggagattagtgcgtacagtgggataaccgttattttagcattagctgcgctgttggctgctctatgtttcgggatgaccgccatctggttcgtcttaatcatggttgcagtgatgtacgtcagtttgaacattgcggttgggattagtttatttcaaactcgatgggcagcttttgatcgcgtctatgctattttattatttgaaatcttaacccatgttgtcttggcaattggcattagccaaatcgtgattttaaacctactaacaggactctaaaaaataaaagtgcgtattttggtacactttttcaaaagaggtttatcattagagttgtaaaaaagaaatgggaggtttttaatatggcagcagctgttgaaaaaacattggttttagatatgaagatgtcagaagcatttgattggagtgacgataacacaatcgtccgtgatgctttgtgggatcactatatggaagccaacggccggaacacggataaaaccgttgaggcaatgaaaccctatcttaagatgagcgacgcggaagttagagaaaaggcagaagcgcttttaaaataaggcaataaaaaaagacccgctaatcattgttgattgaaaagtaataattgagtcttatcacaatgaaaaggtgaatcaaaattagaaatgaatgagaaaacatataacattggcgttgaagttacgatggaaattatcggcggtaaatggaaacccgttattctttgtcatttgcgcaaccaaccacggcgatcaagcgagctctcacaacgcatcccaaagatttcccaaaaggtgctcactgcacaattacgcgaactcgaaaacgatggcatcatcaatcgtaaaatttatcaagaaattccgccacgcgttgaatacagcctctctgaatacggtcagtcactcaataaaatcttaaatctcctctgtttatggggcgaagataacactgatcgccgccaaacagcgggtgaatcaatcactgttttacatcgcgatcaaatcaatccaatcgaataaaaaaaaggcagccaactaggctgcctttttgcttgtcatgatttttgccgaccaaatttcacgaaataaataaccaccatgatcattaagaaaattaaaccaacaatgattgaaatccgcgtttccggattaatgaacatgaaaactagtgtcacacacaacattgccaaagtgatgtaattggaatagggtgaccaaggcatcttaaatggatgttgtgccatcttgtcagcgtgttgctttctaaaggcaatttggctgatcaaaatgacgaaccatggcaccatccctggtaagacacttgaactataaacgagcacgaagacattgccagcttttggataaacaagtggtaaaatggcgtttaaaatcaccccgattaaaatccctaatgaaatcgccccgaccgcataaaatgggacaccgtggcggtttaatttcaagaatcgttttggtaactgcccattattggccaacgtgaacgtcattcgactggcactgtaaatccctgagttagcacccgataaggctgctgtaatcactacaaagttaatgattgatgctgcagcggtaatcccaattttagcaaaggtttgcacaaacggtgaaccgacctgactcaattcattccaaggataaatgctcaagattacgaaaatcgccccaatatagaaaatcaaaatccgcgcaacagtggattgaattgctttaaccaatgttgattgtggattttcagcctcgccagccgtaatcccaatcaattcaatcccttgataggatgccaagacaattgccaaggcgaagatgaagcctttaaagccacccgtaaagaagccgtgcgtccacaaattactaatgccgactggatgcatatggtttccaatcccaaaaacaatgagtccaaggcctgccacgatcatcagaataatcgtgacgactttaatcaacgcaaaccagaattccaattcaccaaacatgctgactgaaattaagttggccgcacataagaacgtaatcgcgaccagtcccggtacccagcccggcaagttcggccaccagaattctaagtaaccgccgatggcaatcatttcactcatccccacgacaacgaattggaagacattgctccaagctgttaagtaaccaaaaattggatgcatatattccgttgcaaacttggcaaaggaccccgtatctggatcaacatacagcatttctccaagtgcacgcataatgagatacagcaataaaccagcaatcccatacgcaatcagcacagacggccccgtccatttaattgtcgtgttggcccccataaaaagcccaaccccaattgtcccgccaagtgcaatcatctgcatctgacgggcagttaaatttcgtttcatagtcctcaaacccctctattttagcatcatcattattggttaaccccagaatctaaatttacttatcatcgtataataaaaaacacccaaaagcaatagtcgctctcatctttttatcatcttaaaagcgctttagaataacccttatattaattgaaggataattaggcccctaaatattaattttaaataagaaaaagcagttactgcgagaaacagtaactgcttttttgaaacatgctttttggttgcaacaacttccgcttaatctaaaatttcaaataatcctaaaacctggattatttgaaattttttattaatgctcagttgctaaccgcaaccaaacgcactcttgtctgaaacgtgcttttcaagctaactttctgcgcttatcccagtgaatcaaacaatcgactacgtcgcttattcgcttccctctgataatgctcaaaagttgaccgagcttgaacccactctttttgaaacgcactctaattggcgacgatattgaccaatttatttggaatggcaatcactttgcgcaccgtcttgtcagcaatgaattcagctactttttcatttgccttagccatcgcttctaattcttccttcggtgtgtctttagctactgttactttggcctttaacttaccgttaacttggaagatcacttccacttcatttgcaaccaatgctgctgggtcaaatgttggccagtccacgtaactgattgagtcatcatggccaagcattgcccataattcttccatcatgtgtggtgcaattggcgctaataacttcacaaagccttcagcgtattcacgtggtagtgtgtcaactttataagcatcattgatgaagaccatcaattgtgaaatggccacgttaaagtgcatgctttcgaagtcttctgtcactttcttaacagtttcgttgtaactcttcttcaattgttcatcattttcagcgacaatcttgcttgaaagttggtcgttttcgtcggtatcttcttctgtgtatagacgccatacccggtccaagaatttacgcgcgccggctaagcccttttcactccatgaaatggaagcatctaatgggcccatgaacatttcgtataaacgtaatgtatcagcaccaaagcgatcgacaacatcatcagggttaacaacgttcccttttgatttcgacattttttcgtggttatcgcctaaaatcataccttggttatataggtgttggaatggttccttcgttggcacgaccccgatatcatacaagaacttgtgccagaaacgaacatataataaatgaagcacagcatgttccgcaccaccgatgtacatatcaactggtaaccagtctttcaacttatcaaagtcagccaatttatcagggttcttaggatcgatataacgaaggtaataccatgagctaccagcccattgtggcattgtattcgtttcacgacggcctttgcgcccattttcgtcggttacgtttaaccagtccgttaagttcgcaagtggactttcaccagtccctgaaggcttgatatcacttgttaatggtaattcaagtggtaattgatcttctggcaccactgatgttgtgccatcttcccaatgaataattggaatcggttcaccccagtagcgttgacgtgagaataaccagtcacgtaacttgtagctcacttgttcatgaccagcattatgcgttactaaccaatcaatcatcttgtcgattgctgcctgtttgtctaaaccatcaaggaaatctgaattaatcatcacaccaggttctgtgtgaacagcttcttcaggattaccaccagccacaactggtttcaatggtaaaccaaatttcttcgcaaattcccaatcacgagggtcatgtgcagggacagccatcacagcaccagtcccgtatgaggctagaacgtaatctgaaatccagattggtaaccgttcgccattgactggattaatggcgtaagcacctgtaaaggcccctgttttatctttcgccaaatcagtccgttcaagatcactcttgtgttcgatttcttttaaataagcgtcaacagctgctttttggtcaggcgttgtgatatcggccactaatttatgttctggggccatcacgatatagctgacaccaaacattgtgtcggcacgcgtggtgaagacatcaatctgagcgtcgtggttttcaacagcaaatgatacttcagcgccttttgagcggccaatccagttgcgttgcatatccttgacactttcaggccaatcaactaggtctaagtcgtcgattaaacgatcagcataagccgtaatcttcaacatccattgacgcattggtttccggtaaacaggatagccaccgcgttctgttttgccgtcaatgacttcttcgtttgcgacaacggtccctaaatcagggctccagttaacagccacttcagcttcataagctaagcccttttcgtacattttttcaaaaatccattgggtccatttgtagaaatcaggatccgttgtattcacttcacgatcccaatcgtatgagaagcctaatgaattgatttggcgtttgaacgtattaatattggtttgcgtgaaatcagcaggattgttcccagtatccaacgcatattgttcagcaggtaagccgaatgcatcccaacccattgggtgcaacacgttgaagccttgcatccgtttcatccgggccaagatatcagttgccgtataaccttcaggatggccaacgtgtaagccttgacctgacggatatgggaacatatctaatgcatagaaatttttcttatttttatcttctgttgttttgaacgatttgtgtgattgccagtaagcttgccacttttgttcaactacgcgatgatcgtaagtcatatcaaacactccttttttttacgtgctttcaaaagcatggacacttttgacgcactcttttttaattcacttaacgccaataaaaaagtcctatggtataaataccataggacgaattgaccgcgatgccacctaagttctgtccaatctatattggacaactctctggccttaacgcggcagacgtttctatctactatcagttcaatagaaaactcaaaggcgagttcgttatgttaaacgacgtgttcacactaaccacacgctctctaaacgcttaacgataactactaatccttctcgacgttaaataattgttcttagcataccaaactcttacttcaatttcaagacttggccgactaagattaaatcagaatgtaaattgttcgctgattttaattgtgcgatactggtattatttttttgtgcgattgaccaaagactatcgcctgatttaaccgtataagtcttcccagaattcgtgttaggcgtcgttggcgttgtagcgccagccattaattttaagacttgacctgggtagataaagttattcttaatattattagccttgattaattgcgccatcgaaataccgttacggttagcaattccccagacagaatcgccgaccttaaccgtataagtcttcccagaagcttgccctggatttgtactatttgtattattgttgtttgaattaccagttgttgcaccttggctaaccactaatttttgaccaggatagataaagttgttccggatattattccatttaaccaagtcagccattgagatgccgtaacggtttgaaattgcccagacagaatcccctgatttaaccgtatacgtcttgtttgaagtctgattaccgttattgctgtttgaattattgttatttgtattgccagttgcggtttttgaaactgttagaacatcgccagggtgaatcatattattcttgatgttattccaactaattaaatcgttcattgaaatcccatatttgttggcaatcgcccaaacagagtcgccggctttaacggtatacttatcaccattagctggtgttgttggattcgttggtgttgtagggtctgttgggtttgtcgtcccaccattgttgttgccagctgcactacttgaaacaatcaagacttggcctgggtgaatcatattgttcttgatgttattccagctaatcaagtcattcattgaaatcccataccgattagcaatcccccaaacagaatcgccggctctaacggtgtattttgtcccattttcaggtgtcgttggagtcgttggcgtggttggagtcgttgttcccccattattgttaccagtattggtccctggcgtgtcatattgcgttaaattgtattgttgaatcaaacggttcaaacttgacgcataattggttgctgttgcataacgtccttgtaagtattgtgtggcttgttgatagctacttgtatggctcttaaatgccccttgataataaggcgttgcaccaaatgaagtattccgtagcacatgcacataatcttgtaacgattggtagtatgaaggatattttctaaatgcagcttggatctgatacatgttcccatgaccatcatcttcccaagtccacatataaacagaactaccattgtaagtcccttttaccccaaacaagttataattaggggcagaacctaaaccactgctcccaaatcctgattctaatgatgcttgggcaatcataacagaggcgtacaaatcgttatcacccgctaattgttgagctgaactagcaattgaattgatgaaattttgtgcgcttgaattagctgctgccataacaacgccagcggttgcgatattggcactcgtactttgcactccagaaattggttgcgcttgagatggtgccggttgtggcgtagccacctttgtcgcttcattttcagtcaattgaggttttacaacaggttgttgtgttgattgggattcagttgtcgttgtgcttgaactagttgttgatgatgttgcactacttgctgtattagctgttgtagcttggtcatcattgtttgcactatttaacacatcttcagtggctgctttggcccgattcgaaaaactaggtgcaattgctgaacccatcaagacggttgcccctgcaaaagtcgtcacattacgaactttcttagttctaatttcccgcttctgcttatgtaagcttaccttttgagctgcaattcgctgttttctagtctctttcaattctaacgcctccgaatttccattattattgtctgtggcacaattaacttgagcttcacctgaactttattataatattaataaaggggaaaaacaatcctatcacgcaactacttttattagttgtcttatgcttaataattattgtatcatttaataatcttctttgtctttaattacagcttattttgaaaggatttcttaaaaatgaccaaacgattttcggctagtttattcattcttggcacaatcagttttctaatcattttaatcagcgttgtgcaccatgccacttgggttatacattttgatacccttatcagaactggcatccggtcgctttcctccccattgatggatactgtaagcattgcgattacgtcgatcggcaatccctatagtataatgactttgaccaccattgtaacgcttggtttgctgggctttaaacagtggtcagcagctagctttttagtcattaacatggtccttttttcaacgcttaaccactttattaagatgagcgtccaacgaccacggcccccatttcaccatcttgtctacgcaggcggctacagcttccctagcggtcatgcttcgggggcgcttctttttttcggaactttaagcatcctagtttactacttaattcgtcaacgcgtttggcgaaaaatagcgattggcacctgtttaatattggcactatgcatcggccttagtcggatttacgtacttgttcattatccgagtgatgtcttagctggctttttattagcaacggcgtgtctcggcggttcatggtactgttttattcattttaaattattgcatctgaaggagtcctaacacatgatacttgatcatcccactaaatttgcacattttctattagaccaggcaattcggcccggcgatgtcgtaattgatgccaccgtggggcatggcgatgataccttatttttagcagaacgcgttgctgattttggtcaggtttacggtttcgaaattcaaaaagaagccatcgaaacctgcgcggatcgtcttacaaaagcaaaccaagcaaaccaggttactttgcttaatcaaggacacgagcggattatcactgccttaccacccgagttaaaagtgcaagccgccatttttagcttaggcgcactcagtcctgattcttttgaacacgtgacattgcctaacacgacaatctctgcctatcatcaaattctctcacggcttaatcgcggtggcttactggtattcgttgttgatcctcggttcaatgaaactcaagaagaaatcgactatctaatcgccgacttaagtcgcctagaaccaactaattaccaagtaacccactacaaggcaatcaacgccgaccaaggacaagtcctagcgatagaaaaaatttagagtgcgtcgtaaggcgaatatccgctgaggattaacacagcgtcgtgaatgattacaacgtaatcgtttgcggctcagggttaaccggaagcggatgccttacagagcacgtttagagtgcgtcgtcagtcgattatctcctattcaaacattaaaaaaaggcccagtcatcattgatgactgggccttttactatcttataatgtcccgaccacttttgtaccgtgtgcttcggaaatttgtaaacgttctgttaacgcgtcgacattgtcggctgtaatgccaccgccaggtaaaatcacaatccgcccatcagcagcttgaattaacgtttttaaacgggcttcgtcgatgggcgcgtctaacggccccccatgcgttaaaatccgtttaacatcatgatcaatcagccattccattgctgcagcttgttgatcagccgcaatttcatcgaaagccatatggaaaacaacttgcatcccattggcagcaccaatcaacatttccatcgcttcttcgtcgatttgattgtcaggtgttaggcaaccaaggacgatgccgtcagcgcctaattcttgcgctgaaaagatatcagcttccataatttttaattcttgatcgttataaacaaagttgccgccacgcggacgaatcatgaccatcactggtacatcgtgttcatgcgcataacgcactgattcagccatcacaccccggctaaccgttgtgcctccgacagccaagttgtcgttcaactcaattcgtttagcaccattgcggattgctgccggaattttagtgaaattttcaacacaaacttctttgattaacatggatgaaccctccaaattttaatttaatcctttatgcaaatagcattgcacctaagacaagtaggcccaagataatccggtaccaaccgaagaccttgaaatcatgtttcttgatgtaatccatcaagaatttgattgaaataattgaaacgatgaatgaaaccaacatcccgactaataaaatgattgattgatcgcccgtaaacgtattgccttggtacaagaatttaccaatcttcaagattgccacgccgaccatcgttggaatcgccatgaagaacgagaattccgcacccacaaaccgtgatgtccctaaaataattgcccctaaaatcgtagcgcctgaacgggatgtcccaggaataattgataaggcttggaaacagccaatccaaaaggccgtcaaccaaggtaacgtatttaaatcagcaaatttcggtgtggtatgcttgttgcgattttcgatgacgatgaacaaaaccccgtataaaatcaacatgctggccacaatccagtttttcatcagatgttcatccatccagtcattcaatgggaatccaataatgactgatggaatcaccgccacaattaccttaaaccataacgtccacgtttgtttttgttcgagctggttcttacgtggtgagaaaggattcaatttatggaagtatagaatcacaaccgccataatcgctccaaattgaatcacataattaaacatatcgatgaatgcttttgattcatcaagtttcaaaacactaccgaccaacactaaatggccggttgaactaattggtagccattctgtaaaaccttcgacaatccctaaaatgattgtcttaatcatatttaaagttaacacaatactaatccctccgtaatccataatcgtttattagtatactcattctaaagttagattgcgactcaaattgaaagcttaatcaaattttattcaattcgcccgcaggaaaagccaaatgacgttgatccatcactgcttgaaaatcggctggtagttcgctttgaaccgtgacataccgttcttcaaatggatgatagaacgttaactcgcgacagtgcaatgcttgacgcggtaataaatcatcggccacaccgtataaattatcaccaattaagggatgccccagtgatgcaaaatgaacccgaatctgatgtgtccgacctgttagtaacttcaacttaactaacgtggcatcggtgccatgggcttcttgccaatattccgttaatgagcgtttgccaccaaccccaacgacccgccgcatgtaaaaatcatccgaccgtttgattggccgatcaatccacgcatgttgcggataatctaaccgcatatcaccactggcaatcgcaacatatgttttttgcaattctttagattggagttgcttatccaacaaactatgcgcgaagccgtgcttggtgaacatcatcaaaccacttgtatcgcgatcgaggcgcgttactacgtgcactgcctggctctcagcattttggtcaatcaagtattgtttgacgaaattggccattgtgttgtgcggatggttcggtgccggtaacgacgccacaaacgccggtttatcgaccactaaaaaatggtcgtcttcaaaaaccactttcaagtcccctttaactgggatgacgtgttcgacggccacttccggtgcgaggtaaacagtcaccacatcgttttgaaccagttgggcattggtatgtgcctcctggccgttgacgaggattgtgccacctgcaaatttaattttagttaactgactgcgagaaagattatgccgccgtaaaaaattccgcaacacacagccttctgcatcttgatattgccattcaaatttcatgttttgacccaataaatgcatcttcgacacggttccagaaatgggtgtgtcgataacgtgcaaactgtattctttcctttgcaattttaaattgcatcgaggcaattggtcgatccttaaatgtgaattgatcaattgtcacaacgtaatcacttgtcttagaaggcttcaggagcaaccattcatccgatggtaacacgattggtgccgatagtgttcgatatacgcgattattaatcgacgcaatttcggtcatctgcatcgcgtctaagcgtggatgtaaaaccgcgccaccaatcgacttactataagctgtcgacccagttggtgtggaaatacagagcccatcacccctaaaactttcaaaaaaattctctttaatgtaaacgtccgtccgcaaagtcgctgcataccgacgtaacgtcacttcattgagcgccaaactgcgactgatttcgtgcgtatccgcatattcgattttaacttctaataacggatagctaatactctgcccgagatcttcttgcaaggcgacgactagatcatcgacttcaaaatcgcgccagtcagtgtaaaaccctaaatgtcccgtgtgcacgccaataaaccggatgtgcgctaaatcgtgggcgtaccgatgaaaggcagataaaagcgtcccatctccaccaactgaaatgaccacatcgggcgtttgatcatcaatgacaaaccccgtattgatcaatttttgcgttaagcgattggcaacttgaacggaagaactaccgtcattgctaaataccgttactttcaatctggcgtctctccttcagaatcattttcagttgccttttcaagtgcgttttgccattttccatatgagaagagttgttgtgcttcttgaatttcttcacgaatttcagacatttctttatctaacataaaggatgcttcggccgctcttttaagccgcgccttcagcgtttcaggaaattccccttgatatttataatttaatgaatgttcaatggttgcccaaaagttcatcgacattgttcgaatctgaatctcggccaaaatcaatttttcaccactgattagttggactggatattcaattacaatatgatatgaccggtaaccacttggtttaacatttgaaacgtaatcccgttcttcaacaattttcatatcagtccgttggtgcaaaaggcccacaatttcatggatatcttccacaaactgacacataatccgcaaaccagcgatatcttgcatatcttgttcgagtaaatcttctgtaatgtagcggcgttgcatcttttctttgatactatcgattggtttaacgcgcccagttacaaattcgatgggtgcatgttcattattttgttggtattgcttgcgcatcccacgtaatttaatttttaattcgctaacggcctgttcataaggcattaaaaacttcttccaattttcgaccattataaacccctcattcactctgtcacatacagcactattttaacatagattagaattgaataaataataatcgtctgaaatacaaatttcattacaagtctgcttttttgtgctaggataataacattgcttttttaaaaaggagctcaaccgatgtcacaaacgattgaacgcgaatttaagacgatgctaacggcggcgcaattctcgcaactaaaagcggactatccatttgcagcgccgtttgtgcaaaccaattattacttcgaactgcctaaccagggattggctaaacgtcactgggggttgcgtattcgactctttgacacctatgccgaacagacgctaaaggtgccaaccgtagaaaatgctcatagtctgattgaaatcactgatcgcctaacacttgagcaggctactcacttaattgagcaccaaaccgtattatcgtctggtcagatcgctgtctattttgcagcacaagccgtgattatcaaagaattgttcatctggggacaggcaacaacgcaccgccagaccgcgtctttagttgctggcctgttaacgcttgatgttacccaataccctgacgaaacccaggattatgaagtcgaaattgaagtcaccaacgtccaagaaggggcaacttggtttaaatcatttgtcacccgctatcaattaagtgaacaaataccacccaataaaattatgcgcgcccttatccatcaagcttaaactttgtcaagctaacttattgcataattttaaaattttgttagagtagacagtacaagcgcgtcgagcagtatatacaatatagaaagtttggaggaaccaacttgttagaagtgtttttatttatcaacccaatcgggcaactttgtttacgttccgaagaggcacttttaaagattatcggcgaaaccgatgcaaatattcattttaagtttattccagtcttaaacttaaaaaacgtcgagcattacatgcagtttcagcaacaaaatagtcatgatttaaacttacgtaatcacgttttcagcaccatttatgaagcagtactcgcttataaggcagcaacgttccaggggggcaagaagagccaatcatttttaatgcaactgcaacaagcattccgtgaaccagatatggaacttaacaacgaattagtccttacaattgctaaacgcgtaggacttgataccgaaatgttacttgaagattggcacagtccacttactaaacaggcatttgattcagatcaacaattatcttgtgagatgaacattcagatgaccccttcagcagtagtcttcaactattcaaaaggtgaaagcgaatcaggcttattgattgaaaattgcgattcctatgaactcttgaaacaagcctgttgtgctgaaacaacacctgaacagactttccaagcacttcaaaaacaaaaaagcaccctctcacgggttgctttgcatgttatttcttaatcttagaaccggtggtcaaccgacccccggttcttttttaatgcttgtttcaaagctatttgcccccattgtgcaaataaggattgctttagtagtggttgttggagtaagggcgttaccgctaaaaaaagatcaattggttgggcactcaaccaccacgttacccgactttcaaactgactgagctgataaatgggtggtacattacgtgtgcagtaacaccagtccggaacggcttgcaagcgttcatggtgggcataacaatccgcctgtaacgcaacataatgtgcgtcttgcagccctaatcgacggtcaataatttgttgctgcataggctgtgacttgcccttataatgattggctggcagtcttgtttgtgctacaagcaagcgcacaaacgccttagttgtcaatcgcagggtttgccaagcataaccagcaaaatcacgggcgacaatatggtgatataacacccattgcccccactttggcaaataacttaccacataaaagccccactgccgccgatagttgataaaccccaactgttgctggcttaaataatggttagtaaaacaataccgttcaccaaccacccataatacaggtaatcggcgctgctgatagccgattgttcgttggtttaacttatctggcgtcaatgggctgcattggtattcaataattaatggttgctgattccgcgttaaccatacatcagcgcgctgtgtctcgccgacaggtacttcaaaggtagcatgccagcccaacgcatgtgctaattcagcaatcgcctgttttcccgccagatgggctggactctcaccaccaccagatacacgttctgcgatatgtgcgaaatatggtgctttatgcaccccacgatgcaactgaaccagttgttgacaatgtggacagaaataccgcgctacttgctgttgtttggctgcttgatcggcgcgaattaagcacccgttagtggtctgtgcaactttcattatttatcacccccaccgaaaatacgcaaaaaaataacgggttctcctaaatttaggaaaacccgttatttttaatgtttgaagtagtagcgtgttaactcaagcgcactattatccatgactttttcaccgaattcacttaaaaaagctgctgtgtattctgacttctgcccgtattcattagcgaccgctaaatcatcccgtgcaaacgcttcggtcgtattctccataaaaataataatctgtgcatagtactgatgtttgtaaagaaataggttcgacacaccactttcgatgtgtagctgttgtgccaaagcaatccaatcgtcaaatgacttaaacgataacacaatctgtttcattggattgtccgcttgattcatataagcggtcatttcatcctcttcctcagtcgcatcatcttggaccgtatctcgtttcaacagttgttctttaatgtattcagtaataccgtctttgccttgcaccatttctgattgacctttaccaccgtcaaagtttggcatattcttactaatcagtaattctaacccttgatcgttaggcaacacttggaacgttactgcatcgttgttcgcaaatgtgtgttcactgtccacttcttccagaattgaatagaagaaccgctcaatctttttatgattgctcaacaaatcaagtccagtaatcccgcgttcttctaaatcatcattttctaatagaacccgaattgtgttctcgtcgattttttccattctcatgggacaacgcccctttctaacgcgcttcttatagcgtcgtaattcactttctttgacctaccataccagtatctggcgtaacattcaagtatctacatcgcagcaattaattttttaacccatcaaaaaagtcgaggctgttaacagccccgactatcctctagaatcctgctagtaattgtgcttgttgtaattccaatgcccgtacttcacgtggtaagaaacgacgaatttcatcttcgttataaccaacctgaagtcgtttttcatccaaaataattggacgacgtaatagccctgggttcttttgaactaaatctaataattcgttgattgataagtcatcaattttaatgtttaattcttggaaaaccttagaacgcgttgagataatttcttccgtgccatcttcggtcatgcgtaagattgttttaatttcatttttattgagaggctccgaaaagatattgcgttcttggtatggaatattgtgttcctctaaccacgcccgggctttacgacaagatgtacaacttggtgatgtatataacgtaaccatatgtctctctcctttattaacatgacaccttacttaacaataagacaatcattttctctcttacaaattttattatacgcgagtcagcactagaaaactaccctaaaattaaatttcttaattattttttaataattaataaatagacatttgaacataaaacgtctaattaaaacggtttattgttaaactttcccactcaccattaatttttatgtttttacatttatatttatcattcaaaaaaaattatagtagtttctactttctaatgaaaattcacttattttttgtaagtttcatcaacgccgcctatattacacgctccgacatcaattgtcaaatcctgttgggcaactatcacgggtacgtccccaacagtcgcttgtacttgtgcctgtagcgtttctgccgaaaccccttgtggtaaatgcgttaatagaattttagctgcgccactttcttgtgccaagttaccggattgcgttgttgtcatatgcgccattttaccagtgcgatcttcaagaaaattcgtatcagtcatcagtaaatctgcagactgacaaaaagcagctaattctgggaaatacgccgtatctgcagtaaagactaagacctgccccgtcgtttgttcttcaattcgaacagcgaatgctgggacaggatgcactgtccgtttgaaagttactttcaacggccccagggtcagctctgtgtcttcttgataaccaaagccctgcgtcacacccggttgtgtcaaactgccaaagtggagtggatcttgcagatgcccgtaaataggtaaaatgggttcctttttggttccttgatgcagttgccaataatattgtaaaacccccacatcagcaatgtgatcgtgatgatagtgcgtgagaaggaccacatctagttgcaatgggtcaaattgtttctcaagcgctaataaagcgccactcccacaatctagcaataaatgatacgccccacttgttaataaataactactagtcccaacaccggcgtatggatatccaccgtaataacctaagactgttaattgcatttttaaatgaccacctttctaatttctatagtagcgcattccgggtatcgcgcgcactatatttactaactaaataaaaaaagaccgccacccaaatggatgacggccctaatgctattgaatgacttggactttcttagctttaacttcttgatagaaaatcgtaacgctcataattaagtatggatagaaccacaagagacctagtccagcagtcatatagacgaccagttcccatccaataaatgataaagtaagcccgagtaatttcagccagttcccttttaaaatcacccatgaaaggctaaagattaatttgagtggtgcttgtggtaaatcaaacttcaacagtactaaaatctgataatacgttaaaatcacgggttgcaacagtgacaaaaccaacatcaccgtcacaaacaataagacagtttcagaaattgtcccctgctggctaatgtttagcaaataaggcgcaacggaatctaatccattaaaagtgaattgaaatacacgatcccaaccgagtaaccgataaaacggcgccaacccaattaatagtaagatccagtttaacacttgttgaacaagattcaataccacaagatgggtatacaacggttgccggaataacaataaggtatcccggtaatagctgggcttattctggctaactttataaacacctaagaaaacagcatttaaaaagataaagtataagaaataattggcaaaggtgttgagcatttgataaccaaatgaactggcgccaaacacgccttcaatcattgagtcgactactatctcaactaacaaccaaagcgcgactaaagcggccattttctgccagtttccttttaataattgacgcgcttttgcgcggtacatagctaattgcaaaaactttccctccgagtttagtagaacacatcactattgagcggtgcattcacaattcgattgtagatattggccgtaattagatagaaaacaaagtaaatgatgataaacaggccgcaaacgatataggctaattgtaacccaggattatctaaaaacaaacccaataaccgaattgcaaagaaggcgtgcatcgatcccaaaataattggcagtaaaaagagcatcaaaatttggaaataaatcgtgcgcttaatctcaccgtcactcatcccaatttttttcaatgttttatactgcaaaatctcttcttgtgcttctgacaattgtttcaacatgatgatactaccagtggctaacatgaagattaacccaataaaaatggcgacatacatataaaatccgaagtttgcgttagcaatatctcggttaggttttttcaaaagcacagaatagcggcttaactcttctagccgttgatcagtggttttaatttcataatgggtttgcccggcttttttgtgcgtcattaaataatcccattgtttgggcttttgagatagacggaataaatcgcgcattaatcgtttttgcttttgttgggcagcggagagctgaactgcatagatttgatcaactgaagttgcttggacttgttgatattcagcatcattggccacaatcacgtttaagttaccatcaaagaagacatcagaaccgtttggaaatagcttacgaatgtgtacaatccgaaaatctgaaagcccagactgttttaattgcaacgggattccagctcttttcggtggcaaacctgcacctgctctgcgaggcatcttcagcattgttaatggcaagttaatgatggtcaccacagtatttttcttcaatttagttgctggtaacttaaattgttgcgccattacttggttgtattgggataatggcatgacaacagctgctccatccattttgatgccttcccgatttaacggtgaattgaccttaaatcgagcatccaccaatttaaacgaagacattgtttgactaaccggctgaacatgatattgcgttaaaattttgtcgaccgctgctttttgactttgtgtataaaccaaatccaccggaatgttctgccgtaatgtatcttgaccgtgcgtataaatcatcgccgcacttccgattgcggtaatagtgactgcacttaaaatcgtaatcatccacaacatctttgcattctttttaaaacgaaaactcaaattcgtaacgtttaacaaatgtgtcccacgataataaagccgtttccagtgccgttctaactgtagccaaatttgcgtataggcctgaaaaaaagccagtgtgccaaaaatttcaagtaataaaatggttagtaaataaaccaaatcaatcccaaaaccatagcgccgctctaagctcggcatcaaaaccagtgtttggtctgccaaataatagccgctgataatcaatacaggtgcaataatcccccataaataagtcagccagttcggtcggcgcactttccgactgactgcagatggttgcagcaatgtcactaattgataccgataaatcatcgtactgtttaaaaaaccagttaataggaacaacccgccaaaggtgaatgtcgtttgttcaatggcccgccatgatattaaaaacggcatggcaaccgcaatccccatcatgcgtaataataacatcgcgaataatttcgaaaaaagaatcccgaataacaacccgataatcagggcaatcacaccgataatcaaactttcaaagaagaagagtaagctaatctgaaatttagtcaccccgatgacacttaaaacaccaatctcccgccgacgccttttaatgaaaaataaattagcatatgccaagaaaaaagcggcaaacagcaaaataattaaacctgctacttggatcatccggccaaaagctaaagattcaccagccatcttgaggtgcctaaagattggcgcagtttgaatcgacgtaaagcagaaataaaccacaatcgcggcaacacaggcaatcacataagccgcatagtcgcgcgcatgattaatcgcatttctaacggttaggtgtaacagcattgaaacggcctcctccacctatggttgcttgcatatcaataatttgattgaagaattgttgccgatcaccattgcgaacgatttccgagaataattgaccatctttaatgaaaagaattcgccgacagtaactagctgtaaaggcatcatgcgtgaccaataaaattgtcgtcttttcctgacgattaatcacggttaaatattgtaaaagctccgtagctgattttgaatctaaacttccagttggttcgtcggccaataacaaagtgggattggtaatcattgcgcgcccacatgccactcgttggcgctgtccaattgaaacttcatccggataacgatccaacaaactactaatgcccaagactcggctaactttatccaaccgtctttcaatcactggcacacttaacttatcaagcgctaatggcagtaacatgttttcgcgaaccgtcagtgaatctagtaagttaaaatcttgaaaaataaagcccaaatcttgccgcctaaaattagcaagcttagcttcccgcatccgactcacaacttgatctttaattaacacttgaccatgcgtcggccgatcaatggtcgcaatcatatttaataaggtcgttttcccagcgcctgaagggcccataataccgacaaactcccacggttcaatatcaaatgaaatattattaagcgcattgaccagactaaaccgatgcccgtagactttcgaaacttgttggactgatacgactgccattttttcacatcccttaactaattagtattcattttagcagagttgaccgcaaaagcccattttataactacgaccttagttggttgtcttttctagtgaaagtggttaatattagtctatctatgtatgaggagaattcattatgtttgaaattatgattgttgaagacgatccaacgattgccaacttaatcgctgagaacttaaataagtggcaattacacgcaaatattacgaccgatttcgataccattttcgaccaatttttaaccaataaaccccatctgattttactcgatatcaacctgcccgtttatgacgggttctactggtgtcgcaaaattcgtgaagtatctaaagtccccataattttcatttctagtcgcagtaccaacatggacatggtgatgtcgatgaacatgggcggcgatgacttcgtcaataaacctttttcgatggaagttttaattgccaaaattaacgccctcttacgacggacttacaactacgtcgaccaaaatgccgatatcatcgaacataacggcctaatgattaacctccaaagcggcggagctcaggtgggtgagactaccattgatctttccaaaaacgaatataagctcctccaatttctgatgcgtcaacacggccagattgtcagtcgcgaaaagttattgcgtgccctctgggacgatgaacggtttgtcgacgacaacacactaaccgttaacatcaatcggcttcgcaaaaaaattgaaagtgctggtttagaagactacattcagacgaaaattggccaaggctatatcatcccctaaggagttattatgacgtttaaaaaattcttacgtgatcatttatttcatatcgcttttttcttcagcggtatgattgttctggatatcgtcctatggctcgaccctagtatgcgttttgctaaggcgacacttttatacctcgatttattgctggcgctttttttctgcgcctttttggttggcttatacgtctaccatctcaagtggtaccgcacaatccaaacacgcttagatgctaaagaagatagcctcaactggccacttacaggcgctacctcggctgaaaaacaattcattcaacactacgtgaatcaactgctagcctatcatcaacaaagcatcgaccgactaatctcagcgcaacaagatcaaaagaatttcattgatggctgggtgcacgaaagcaaggtccccctggcagctactcaattgctcattgaatccatcgaagaccagattccagaagacaaattcaatcaattaaccgatgaactgattcaaattgaacactacgttgaacaagtgctctactactcgcgtctcgatagtttttctaaggattacttggtgcaggaatacgatttaaaacctttagtcaaccaaatcatccgccaaaatcgcaattattttattcaaaaacacatccaatttaaactgcttggtgccgatcaaaccgtcttaaccgacgctaaatggctggcttttattttgaatcaaatcatttccaatgcgttaaagtatacccccgacggcgcacaaattacggtacagattgaacgtgacgaacaaggcgtttggttaagtgtcatcgatacagggattgggattccggctgaagacctaccccggatttttgataaagggttcaccggtcaaaatgggcgctattctaaccaacgttcaaccggtttagggctctactttgcacgtgccttaagtgaaaagctcggtcacgaactcaccgttagctcccaacaaggcagtggttccacttttaaattactctttccttttttaagttactacaacacggatgacgatgacggcttattcggcaaaacccatcctgcagacaaatgaagcggagcttcaaaatgcgtaaaacacttttaatcactacacttttaacaataacactcctagcaggttgccaagctaaaaaaccggcttcatcaaccacatcccgcgcgcagccaactacgacgacctacgccaaccggacaacaactaaaaaagccctcgcggccgattcacagacttggttgtttaacaaacaactcctttctaagcaaactaaaaacggtctttctgatgacatcactgtttcaaatattgctcaaatgaccactcctaaaagttggctgacctctaaaggcaccttcacaagtcagccgattaattatcaacaaatttcgtttaaaaaatggcaacaagatagccgcagtcatctgatgaagagctatcaaaagacactccatctgatgactgtggcacaagtcaacgctgcattacacaaattgggggctgactttaagattaaacacctctcagatctcgtctttcttgagactaagactgggaaaaatacaattgaccagggattcgttgccaaaggaaatcgcctatacgcaattacagctcattacagagatctacaaacccccaccaattttgaccgcggacagttattcgtcagtcaaaaagcaaccgccaaaacaacagccagtcctgttgccctcgaccaactcaatggcacttggattgcggccgcaacaacgacgagtgctaatgacaccggaaaactgatggtcaaagatggcttcatgtaccaaaaacgttataatagtattgaacgctctgccattcaagatcttgccaaatacactttagtaacgctcaatcaaaatacaatctatgctgctcaaaaaagggatgcagcacaagctggttatcaattaacccctaagtcgattgctagtggtgatagtatcggttatctctacctcttcatgaatgatcatgaactgctacgcatcggtgctggtcaagcaacaagctatcaaaagacggactcactagtagctgctgccgatttatcacagactgatcaaaccatttttgagcaacttgatcaacaaaagcctggtgaatcagcttcaaccattacggtcaaagcaggtcccgctgttgtcgggatgagtgatagtatcaactatctaaccgatgcaaccgctggccagatttcgaacaatatcgtcattggtaacgttcaaaacgggcacgtcaccattgcaagtgagtcaactcattaattataggcacaaaaaaaggtccgacattcatgtcggaccttttttgtgcttaagccgcttgatcgcgggctgcttcttcttttaaagccatgtctgtggcaatcttgatgaatggtaggtaaatgagcactgaaacaagtaagttcactgctgctaataccccaccttgccaactaaccgttgcgatgaccccaccgataattggtggtgttacccaaggtggcataaccgttgcagcgggcactaacccggtgctagttgcaaagtatgcaattgtaacgatcaccattggtgtggcaatatatggaatgaataaaattgggttcaatacgattgcaagccaaatgttaatggttcgttaatattgaagatcccaggagcggcactcaaattcccaacgattgaatattgtttattctttcgacccactaaccagattgcaatgattaagcctaaagtggcaccagtcccacctaagttaacaaatgaatcaaagaatggtttgttaacaatatatggtgctgctttaccagctttaatcgcatttaagttagctgtaattgcaggtgcattgattgtttgcatgaatggttcgatcatgttagcaccgtgtaacccgaagaaccataagaatggtgtgatgaatgctaataataatgctgaaggatagctgtttgcaagtccttggaatggttcttggacggctttgtagaatgatgtcacaatattttcaacaccaaagcctaatagaattgttgcaaataatgagaagactgcgatggtaatcattgatggcaataatgccgcgaatgattgtgaaactgcaggtggtaccccatcaggcatcttaatgactaagtgtttattacccaataaacgtctgagaatttctgttgaaatcatcgcaacgattaaagcaacgaacaagcccattgagtccatccctgcaagaccgccagcagcaaagaatgaccctaatgctgttacgccggctgctagtggattgatattatatgacttacctaaattgtaagcaactaggaagacgataaacacagaaagaatcgcaaatatcccgctccaagcattgcccccgaatttagtccagatataagccttttcagcgcccttaccaactgtctttgagaacacactatccatgaaattggtatatgccggaattggtaaattattaatcaaggttgcaaaagcacccaagatcatcaatgacatcgttgttacgaaggcgtcacgaatggcaaatgtcgttgattcccaacttttgccacaactggtaaaaagcgtttctccatgaaactgataaatgaatccattaacctcactccttttcctgaatcataattaaaaaataattgctattacaagtattatgttacagaaagcgttgtcaaacgataaccccgttcattacctatgaatgtccagtttttcacaaaaactaaaaaaagcgccaacccattctaatcatggattgacgctcttttttatccgtgttaggtatataccaatgacggaaaatgaaaattaaatttttaataactttattttacatattactttcaatgaacaagctttgcccatataacgggctttttagcggctaatgattttttgacatcgataatccgttgattggcactccctctgaactgcaatgtcagatccatttggtccttcatgaagcgcccatcaactaagatatcaatcttagacagcaactcgagtttatcatctgattcttgcatcagttcttcccacgtatatcctgtccatgaccagacgtcctttgtctgcccataagtggcgcgaattcggtctactagcgataaacaagtcttggtattcaagaacggttcgccacctaataacgtcagtccttggacataagattgccctaaatcagcaataatttggtcttctaattcagttgtataagggcggccatagcgaaaattctgcgccactcgattgtaacaaccggggcaagcaaacatgcaaccactcacatataggctacagcgcaccccttcgccatcaacaaagttaaacggtttataatctgcaatataatcctggcttagtgtttcagaaagccattctttgggcgccggattcttcgggccttgttgttttactgccatcttcaaaaactccttcaaatcccgtattcacaattactgccgtgcaacgttgttattatcgttgccaatggtaatatgcatgtgcttaactcgactggcgatttccttatgccgaccatgcaccattggacgttgttgtggattacctagataaccacaagtccgcttaacgacgtcacatgtagcagcatccgtgttcccacattgcgggcattggaacccgcgttctgtcggcttaaagtcccctttaaacccacatttgaagcattgatcaattggcgtattcgtgcctaagtagccgacacgatcgtaagcataatcccagacagcttctaaagcctttggattttgacgcagatttgggtattcacagtaatgaatgaacccaccagaacagtattttggataatctttttcaaaatctaatttttcaaatggggttggtgccttacgcacatcgtagtggaaactatttgtgtagtattctttgtctgtaatattttcgacaatgccaaatttttgcgtatctttttgacagaacgtatttgttaaactttctgctggtgtgctgtaaacagagaagtgatagccgtattccttttcccaatcaacgcagtgattatagaggtctttaacgacgtctaccgtaaaggcttttgccttggcatccttttcccagtctggcccaaagaaggctgtaccgacttcataaaggccaatatagcccaatgaaacagttgcgcgtgaatttttaaagacttcatcaacactatcggttttcttcaaacgcttgccaaaggcaccatattcataaagaatcggcgcattttctggcttcgcttctttagcgcgttccactttaaagaccagggcttccttgcagacttgcaaccgttgttctagaatttcccagaacttagcttggttgccatcagcttcaagtgcaatccgtggtaaattgattgtcaccacgccgagattcatccggccactattcacttcttcaccatgttcgtttttccagccttgtaagaagcttcgacaacccattggtgctttgaaagaacccgttaattccaccaacttgtcatacattaaaacatcgggatacatccgttttgtggcacattcaacagctaattgtttgatgtcataatttggatcagttggatttaagtttaagccgcgttttactgcaaaaactaatttagggaagatggcagtccgtttttctttacctaatccttcaattcgaattgaaagaattgctttttgaatcgcacgttcaatccagttactgcctaatccaaaaccaagcgttgtaaatggtgtttggccttgggatgaatataaagtattgatttcatattccaacgcttgcatggcgtcataaatatctttttcagtcttggtttgcgcataatccttttgttttgcttcgccatcaatccaattcttggcatctgctaaatgtttggcataattcttttcggcaaatggtgccaataattcatccacccgatcagcggaacaaccaccatattgactagaagcaacgttagcaataatttgtgacatttgtgccgtagcagtttgaatcgaatgtggcgcttcaacttcggcattcccaatcttaaagccatgattcaacatttctttaaaatcgattaaacaacaattggtcattggactatatggttggtaatccaaatcgtgccaatgaatctcgccttttaaatgggcgttcgccactttatcaggcaacatcttaagccccatcgctttagcaactgtccctgccgttaggtcccgctgtgtattaaaaacatgactatctttattcgcattttcattgaccacagtttggtcttttttcaataatttttgaatggtaaagttgatatcagttgccttattccgggcaaagtcccgttgcgtccggtagttaatgtattcttgggcaatatcatattggtgatgttctaaaagtttatgttccacaatattttgcagttcatagattttaacatctttatcaaatcggctgccgacttcactcacaacatctagtgcgactgtgtttaacacttgatagtctaatggctctaattccgtcttcacatttttagcggctttaataattgcttgttcgattttatccgcagaaaaaggcatgattcgcccatctcttttaatcactttaatttgcaagtctgcttctgaagcaattttcatatccatcttagcaccagtctccttttgaatcagtaaccccatcatagcggattaaaaattcggattcaacctatatatagtagataaaccaacaaaaagacgcactacaactatatgttgtgtgcgtctaattgtgtgcgatattttctttcgcccgtccttatcgaaatctacttcatactgcttaaaaaaagattgacatcatgcatctcgttttaatttcaaagtcattgcattaatagccacaacaattgttgagagtgacattaagattgcaccaactgctggacttaatactaacccaattccggcaaatagccccccagctaatggaatcgctaaaatattataaccagcgccccaccagagattttgcgtcattttgcggttagttgcgtgcgataaattcaagaaatgcataatatcgtttggattactcttcacgaggatcacatctgctgaatcgattgcaacatccgtcccagcaccaattgcgattccgatatcagcccgcgttaaacctggtgcatcattaacaccatccccaaccatcaggacgacttcgcctttagcttggtaatctttgacgattgcttctttatcttctggtttcaagttcgcttgaaccgtcataccgcccaattgtgcagccactttttcggcaacttgttgattatcaccggttaacatgaccggttggatatgccgtttctttaatgcttggatgaaagctggcgcttctggtttaatctgatcaccttgtgcgactagtcctaaaaccgtttgatcttgtaatagataactgatggaattccctttttctgctaaagtttggaaaagagcttgatcaaatttaatatgctgggcttgtaaataagttgccgtcactatttgataactttgccctgcaaccgttccagacaaaccgacgccttgaatcgtttgaacattgtctgcctgtaaatcaggaatagtttgtgcttggttatactctagaatcccagtggccaatggatgacttgaatggcgttctaacgcaccaaagagttgcatgagtcgttgttcatcaagtgctgtatcgaaaacttcgacagcattcactttgaatgcgccttgtgtcaaagtccccgtcttatccatcaaaacaacggtaaccttatctgacaattcgattgcttcacggttacgaatgagcaagccgtttgtagccgcaatcgctgtacttctggcaaccaccaatggaatggccaatccaagtgcatgcggacaagcaataataaagacggttaccatccgttcaaaagccgtattcagatcggccaagaacacccaactaatgaaggcgataatcccagcaaccaatgcagcatagaaaagatacttcgcaactttatctgctaacccttcaacttttgatttttcttgttgtgcttgtttaattaatttcatgacttgcgctaagtaaccactttcgccagtcccggtcacttgcacggttaacgtcccatttccgttgactgtcccaccgattacttgatcgccttcagccttcgcaacagcctttgattcacctgtcactaaggattcattgacttggctttgaccggcgataattaacccatccgcgggtactttttcaccagctgcgactaatacagtttgtccttttttcaagtcctttaaatcaaccgcgtgttgatgccctgcttgatcaattacttgtgcttggccgggtaacaaagcagccattttttctaaagcactccctgcactcattaccgcattcatttcaatccagtgtcccaacaacataataacgattaacgttgcaagctcccagaaaaagtccatcacatggccttgtgggttcaagaaatggttcgcaacaaaggcgtataaactatatagataagaaacactgatccccattgcaattaaggtcatcatcgctgggctcttagcagataattctccttgagcgccctttaaaaacggtgccccaccgtaaaagaagagaaatgttgctaaaatcaatactagccaatctgaacctgggaaagtcgtttgaaaaggtaactgcatgcccataaatggtgagagaattagaattggtaccgttgcaattaatgaaatccagaatttttgttttagatttcccatgtgcatcatatgaccaccatgcatcatcatatcgccgtcgcccatgtcatggtgcatcccatgcatatcgtgattcatatgccccatatcatgatccatcatctcgtggtcatgatgcatgtcgtgcatgctgtgatccatttggtgctcgtgatgcatctctttcatatcgtgtccttcatgttcatggtgcatttcatcgtgtttcattttacttcctcctctatgcaatcacaattggctggtaaacaatcacattcaatcattgttggtgcactaggtaatttagccgctaacaccgtttgtaacgtctgaatatcattttgactgagcgttgtttgctcgattaaagtggctaatgtgcggccttttttcatcccacataattggttaaacagcgactgcgtggcatggttcatcgcttcatcttctgcgatattggccgtatatataaatcggcgtccttctttagtggcaattagatagtctttttttaccaaccgacctagcaaagtcttaacagtcggcgcttgccaatcacgcttttgctgaacgagttcaattaaatgactgctgttgacttgcccaagtgaccaaaccatccgcataatttcccattccgcatccgtaataacccctattttttcagtcattcgcggttttctccctttcgtttacatttgtaatcattagttacagtttacatttgtaatcgataactgtcaatcttttttgctcatccaaattttacgcacaaaaaaagaccgccacagtgggcggtcttttaccatttaattaaagattttgcataaaatcttcaactaatttttggttttcttcattacttgtattcacattaacagcggtttcaactaaatcagttaattgagttgtatctaaacgtttcatcaagctccgaacccgaaggaccgaagttgcgctcattgaaaattcatctaagcccattccaacaaggagtggtgccatgactgaatcgccagcggcttccccacacattccagtccacttaccttctttatgagaagcgtcaataacgttcttaattaaacgtaagattgctggattgtatggttgataaaggtatgatacacgttcattcatccgatcagcagccattgtgtattgaatcaagtcgtttgttccgatactaaagaagtcaacttccttagcgaattgatttgccaagacggcgctggctggaatttcaaccatcatcccaacttgtaaatcatcagaaacagtttgaccatcagcaattaatttagctttttcttcttcaagaatgccttttgcttgacggaattctgtgacagttgcgatcattgggaacatgatacgtaacttaccgtagtttgaagcacggagtaaagcacgcaattgtgttctgaaaatatcatcacgatctaaactaatccgcacagcacggtagcctaagaatggattcatttcttcgggtaatggcaagtaaggtaatttcttatccccaccaatgtccattgtccgcacaacaactggtttaccagccataccttccaaaacagtcttataagcttcgaactgatcatcttcactaggtaattcagatgagtccatgtataagaattctgtccggtataagccgattgcttcagcaccgttatcgataacaccatctaaatctttaggtgtcccgatatttgcagcaactgtgaatgtttttccgtcttttgtaacggatttttcattctttaacttttcccattctgctttttgatcagcgaaagcttgcgccttcttatcgtattcagcaatgtctgcatctgtaggattgataataacatccccgttaatcccgtcgacaattaattgttcgccggctttaacagaagttgtgatattttcagtcccaacaattgcaggaatttctaaagaacgagccataatagcagagtgagaagtccgaccaccaatatcagtcacaaaagccttaacgaatttaccgtttaattgggctgtgtcacttggtgtcaagtcatgagcaatcacaattacttcttcatcaattaacgctgggttagggagtgttacccctaataaatgactgagaactcgcttagtaacatccttgatgtcagcagcgcgttcttgcatgtatgcgttatcagtcatagcctcaaaagtggccacgaataaatccgcgatctctttgagcgcttgctcagcattaaccttgtcatcattgattttaccttcgatagcgccggtaaattctgggtctgctaaaatcatcatgtgggcatcaaaaacttgtgcttcttcttcccctaatgattcagcagcaatcttccgaatggtctctagatcactcgtggaagcttgtaaggcattatgcaaacgattaatctctttttctgaatctgaaatagttgatttcgaaaatgacaaatcgggttgcactaacatataggctttcgccgtagcgataccatcactggcagcaatccctcttagttttgtcattattcagataaaccttcctttttcattgtttcttcaattgcgttgattgcgtctgcttcgtcagcaccttcagctgagatagtaacgtcagcaccttggccaacaccgagtgacataacacccatgattgacttcaagtttacagatttacctttgtattctaagttaacatctgagttaaatttgcttgctgtttgtactaataatgtagctggacgtgcgtggatacctgtgtctgctactacgtgaaaatcgcgtttttccatattaatcgatccccttttatctaattatagatttagtttttaacgaaatgagtggtcactagtagtggctacccttccgatatttaagattaccattttttttaaaatactacaatagtttcgctaacaaaattagtagccgtctacactataccgctttcagacttgcggtagattaccgcaccatttcgttgtgcttcgcccacaatttcttttcgatggtcatagttgacccatactttctgaaaatctaaaaattcggactgagtaacctcaatctcagtttgttcgttatttattaaggcatccatctctgctaaaaaatcacgcatctgccattctgcctcctttgcaattcttttatcgtggcttgaaaaattcgttttcattccatctgcgaaataaaacgatgacctcatactaccgcataccgcccatacctgacaagaaacttttattttcgagttgcctgacttgcaactttttttagagatgattataatttggataaaggtcaaagatagtcaagaacactttgacgattctattattaatgaaaggttgtgacagattaatgctttgtcaaaactgccagaagaatcctgcaacgattcatctctatacaagcaccaatggtcaacgacaagaaatcgatctttgtcaaaactgttaccaactcttgaaacaacaaaacagtaatggccaagcaccacaagggcaatatgcagatccatttggctttggaagcctggatagtttcttccgagcaatgggcgcaactcccgatgatcaatcacaagcaaaccaagggccacaaacccaaagtggcggccaaggtggcggcaacaacgggcaaaacggcgaaagtctgctcagtcaatacggtgtaaacctaaccaacttagctaaagctggccaaattgatccagtgatcggtcgcgatgctgaaatcgatcgtgttattgaaattctaaaccgtcggacaaaaaacaatcccgtattaattggtgaagctggggtcggtaaaactgccgttgtcgaaggcttagctcaaaaaattgccgacgatgacgttcctgccaaacttaaggataaacaagtcattcgcttagatgttgtttcacttgttcaagggaccggtattcgtggtcaattcgaacaacggatgcaacaactgatgactgaattgaagcagaataagcaatacattctcttcattgatgaaattcatgaaattgtgggcgccggtaatgccgaaggtggcatggacgccggtaacgtgttaaaacccgccctcgcccgtggtgaactccaactagtaggggccacaacgaataatgaattccgacaaattgaaaaagacgcggccctcgcccgtcgtctccaacccgtttcagtcaatgaaccttctgttgacgaaacagtccaaattctaaaaggactccaagataaatacgaagcctatcaccaagtccactacacagacgaggcacttaaggcggctgcaaccctttctaatcgttatatccaggatcgtttcttaccagataaggccatcgacttacttgatgaaaccggctctaagaagaacttgacgattaccgttgtcgatccaaaagaaatcgaaaagaaattacaaaatgcggaagctgaaaagcaaagtgcgttaaaggacgaggattacgaaaaggccgcttattaccgcgatcaagtcacaaaattgaccaagatgcgcgaaacaagtgccattgaccaatctgaaatgccaaccgtcaccgacaaagatatggaaaaaatcgttgaagaaaaaacccacattccagttggtgagttaaaggcacaagaacaagcacagttgaagaaccttgctgaaaatcttgaagcgcacgtaattggtcaagattcagcagtcgataaggttgcccgttccattcgtcgcaaccgaattggtttcaacaaatccggtcgaccaatcggttctttcctattcgttggaccaaccggggtcgggaaaactgaattagcaaaacaaatcgccaaagaacttttcggtagcacagatgctatgattcgttttgatatgagcgaatatatggagaaattcagtgtgtcaaaattgattggatcacctcctggctatgttggctatgaagaagcgggtcaattaaccgaacaagttcggcgcaacccatacagcttgatcttactggatgaagttgaaaaagcacatccagacgtcatgcatatgttcctacaaatcttagacgatggtcgtctgacggattcacaaggacggacggtcagcttcaaagacaccatcatcatcatgacttcaaatgccggccaaactgatgccgaagccaatgttggtttcggggcaaccctttctggtcagacacactcgattttaaaccaactacaaaactactttaaacctgaatttttaaaccggtttgatgatatcatcgagttccaaccattaagcaaagaaaatctcttgaagattgtcagtctgatgctcgatcaaacaaatgcgatgattgctgaccaagggttaaacattgccgtaactgaaccagtcaaatcacggcttgtcgatcttggttacaatccagagatgggtgcgcgtccattacgacgtgttattcaagaacaaattgaagatcgcgtggctgactattatctcgatcacccagaacataaacaattgacggctcggttggtggaagatcagattcaaatcaccgatgctaaagattcacaggtcacagattaaaaggctttattatctcaagttaaaacgaattacgtgccaaatgaagcgttttcatttatactagtggtaagacttaaacacccagggagtgatttagatgcgcttaatcaatgtaaccaattcttataagcgacttgtttcacaacaactcgctgcaacagccgcaacctacgttaaggtttattcacttggtaaaacaacggttcttgactcgcgttcatcgaaggaacgtgagctccttttaaaaaatgatcatcgacatgtccaacaagccgagatcgattttgtattgaaggaactcgccggtttagattccacagatggccttgaagtcttgaatgatggtccattagtcgaaattacaattccaacaccttcaaaaacagtgagttaatcattcgaaccgccccgacattttgttggggcggttttttacataggcaaaataatggcaattgaataggtcgtaccgtataataactttcaacctaatttaggaggattaatgacgcgatgaagacttttcaaaaagagcaccaaattatttgccggttagaagtgggcgacgaaatcctaacagaacttaaatatttggccgcaaccttccccaaccaactgggaactatcacggggattggtgcctgtgatgaagttaccgtcagcgtttattcaccagaaacggatcaatatattgccacttccagtcaagagcaagtagaactgctggcccttagtgggaatgtcgaaaatgcaaatggcacgattgatgtccatctacatgcaagctttgcccgtttagatacaagcgtttttggtgggcatctagaacgcgccgtcatttcacgtacaggagaattaatcgtttccttaattcccgtttccatcggccgcgtcacccatactgcaactaaattacaagtattagatatttaaacgattagaatcactgctatttttgcaggggttcttttttatgcccacttgacgcgttaattatcaaccacactttttgtaatttatgatagactagtagtaataagtaatgcgctacaaggagtccgtatgaatctgattaacctgcttcaatcgttattgaaatggcgcccgaaaaaagcagctcctctaccgaacagtcatgtacgccaaactgtctctgagcaagagcccatccgtcaagcgcctcaatcgtcacagaaacagccggtcgttcccgttagtcaggacgcaacgccactgctggctacgatgtccacacaaccgcgccatagcacagttaccattcactacctcgatcatcatcgggtccctttacgaccaacgatgaccctgacaggtgaagtgggtaccgtgctcaatttgccatggctaaaatttgccggttattacttggcagctattaccaatttaaaacaacagtttcctgaagaaaacaccactatctggcttttttataaaccgcaactcgcagcaccagtaatggtgttacaccagaatttagaaggtggcttgttgattaagccccaatttttatcaggtgctttgaacgaacactatcaagccaatccactagaaggtggtgctaacttcgtgcaccacacctcagctaatcagactggtcgctttacaactaagacacagtttgtccattttaaatatgatccgctgaatttaaaacacagcgatgcacctgaacagcccttcatcgaacttcttgagccaacggatacctatcagcaaccaagtgaagaatcgctgactgctgctcgcttgccaaagcacgcggtttggaagatttatagctgtgcaactgctccatctggcaaacaatggttcaatcttggcagttcttggattacccctacgcgttatcaattacatgccactaatcctaaaggcagtgatgaatcataccaagtaccaaagttcacctaccattacgcagttatcgaaacaacccctctaaacctcagtgcaagtctgaacaacaataccgtaacattttggcaagcaccgtatgaccaacccacaacatatcagatagtgcctaaaacacgggtagtcgttaagcaagtcgttgtactcgataatcaaagtcgctggtgtcaacttaaaacaggtcaatggttaatggaaggcctcctaacttttgactaaatacccccctaaaaaaataagccgccgattcagacaacagttagtgtgtctgaatcggcggcttatttttgtttgactctttatattatagttttgcggttaattcaacgtctggatacttatcttggaaccaacgttctgcaaattgattttcaaataagaacaatggttcgtcatgaatatcttttaccaatagatttcgtgaggatgacatccgttcatccaattgttctggattgatccaccgcgcagttcttgaaccgattggatccatcaatacttcagaattatattcgtgttgcatccgatattggaacacttcaaattgtaattgaccaacggcgcctaagatataatcgccagttgtgtaagtcttatacaactgaatcgccccttcttgaaccaactgttgaatccctttatggaaggacttttgtttcatcacgttcttggcagtgacgcgcatgaataattcaggggtaaattgagggagtttctcaaatgaaacagcctctttacccgtgtgaatcgtatccccaatttggaaattcccggtatcatataatccaacaatatcgccagcaacagcgcttgtcacctgttcccgtgtgtcggccatgaattcagttgaattgttcaaccgcatcttcttgcctgttcgcgtcaatgtgacatcaattccgcgttggaattcacccgaacaaattcgtacgaacgcaatccggtcacgatgagctggattcatattggcttgaatcttgaagatgaaccctgagaaatcaggagaggttggttcaaccaacgtttcttcttgtgttttgtgtgcttctggggcaggcgctaagttaacgaatgattctaagaacgtcttaaccccaaagttagtcaaagcagagccaaagaagattggtgtttgttcacccgttgcaatcttatcagcatcataggcattgcctgcttcaccgatcaattcgatatcatcaagggcttgtgtgtaaacagaatcttctttcaatggattatcaccggcaatccgacctgcttcatcaagggccaaataagggttggcttcgtcttctggtcgataaagttcgattcgacggttggcgatatcataaaggccacggaggtcttttcccatcccgattggccagttcatagcacagccttcgatgtccaatagttcttccaattcagcaatcaaatcaagtggttcacgaccatcgcgatccaacttattcatgaaggtgaaaatcggaatcccccgcattttgcagactttgaataatttcttggtctgtggttcaatccctttagcagaatcaatgaccatgaccgccgcatcaacagccatcaaagtccgatacgtatcttctgagaaatcttcatgtcccggtgtatccaaaatattaatccgcttgtcgtcataatcaaattgcatcacagaactggtaacggaaatcccacgttgcttttcaatttccatccaatcggacttggcaaattggccactctttttccctttaactgttccggcttgacgaatcacgcccccgaaaagtaagagttgttccgtaatcgttgttttaccagcatccggatgagaaataattgcaaaagtacgacgacgatcaaccgccgtttttaattcagtaggtgtcattataaaatcctttccgttattccaatataatgcgcttgggacaaagaattgcgcaaccattgcgtcaccctttgtcccattgattgtgctcatttaatttagtcgacttcttctggtgcatcggtctctggttctggtaacgttaattgtaaatcaatcaaccgtgaaccggaaaccgaccccgtcgttaagctcatgccacctggcagctcaattgtttccggatgaccactgactggaatggcaccaatttcagtaatcacgaacccggcaattgtatccacatcagtgacttgaatatctgtattgaaggcactgttaaattcattgattggcatacttcccataacggtgtaatgctgcgcatcaattttttggtacaattcttcagctttatcagattcatcatcgatttcaccaacaatttcttccaataaatcttcaatcgtggctaagccaacaacgccaccgtattcatccaacagaattgccatttgttgctgtgtgcgtttcatttcaaataataaatcatcaattgtaatcgtttcgggaacaaaaagaggttctttcattaccgcttcgatttgcatggcctgaaaacctttttggcgtgcttctttcaagagattcttgatatgcacgacccccaccacttgatccttatcatcccgataaaccggaatgcgggagaatggttgggctaagatggcatcgatgttttgatcgttgtctgcacaaatatcaatcataaatgcatcagtccgcggtaccatgacttcgcgcgccatcttcttattgagggtaataatcccctctaacatttcgtattcatcggtttccagaacaccggcactcttcccagattcaatcatgtggaccatttcttctcgggtgagcttcggttctgtttctgaaaaatcaattggtgtcaacttcattaagagcgaggtcgacattgatagcaaccacacgaatggtcgcagtaagataccgacgatccgcacgggttgcaccgttattttagcaattgcttctgcacgatgcagtgcaacttgcttaggatataattccccaaaaaccagggatacataggataagacaatcgtcacaattaatacggccgcttcctttgtccaagccgcatttcctaaaaggggtgctaatctacccgcaatggttgtggcagcactcgctgaagataagaagcccgcaaacgtaatcgcaacttgaattgttgctaaaaactgattggaatgacctaagacttgaactaatactcgcgccttcttgtcacctttattggcttgctcctccatcttcacacgacttagtgacacaagtgcaatttctgccgcagcaaaaaaagcattcactaaggtcaaaattaatatcaacagtaactgtccccacaccgaacttccagggtcaggattcatcgtcacatccactacctttcattatctaaataagtacatttagccgaatatggcctaccttgcagtatagcatagtcaaaaatggaaattcaacctgcatcttttaaaggtcggtcccttttttagctttagtccgtaacgcttgaatatcatataaataagtaatcactgtcttggtaacagcataaaacggaatcgctaaaatcatgcctaaaatcccataaatattcccagcgaccaataagataatgatgatggttagcggatgaatatctaatgaacggccaatcacgttaggataaatcaagttaccatcgatttgttgaacaacaatgacgacaacaatcaccatgattgttttgggaatcgaaattgataaactgataatcaacgcgggcgcaatcccaatataaggccctaagtatggaattacgttagaaacgccagcaataaatcctaacaaataagcgtatggcatcccgataatgagataaccaataaatgtaaagacgccaacgaataaacactctagagcttgaccaccgatataagctgaaatcgtcgcccccatcttccgaagcaagtccgccacttggtcgttataacgatcaggtaacatcttttgaatattaggcactaaacggtgtccgtcttttaacatatagaacaacataattggaatcgtgaagacactaactgtaacgctcgtaatcgcaccaatcatactaccaaaaccagatgtgaaactcttcataactttttcagcaatcttcgatggttttaaatctaactgattgacgtatttattgaagtcaatgtttttcaagcgcggattgctagataaatcatccgctactttttgcagtcgatgagcaaaatctggtaggttcgtcacaagttgtgtgatttgtttaatcaagttaggaatcacagtggctacaatgaaaattaaaccgccaaaaaagacgatgaagataatcgtaatcgcccagttgcgtgatattttgagtttacctaacagattgattagcgggttaaacaggtaaaataataatcccgcgccaataattggcccaaataaagttgaaataaaggtgccaattggatcaaataagaagctaattttggtgcaaacaaagattaacacagccaaaatcaaaagctcaattgaccaaaataatagttttgattggcgtaaacgatcaaacatgcagtatccctccagtgtgcctgtgtcacacaaaacgcattttatgctatcatagtgtaacgattattgttattgtaccaaattttatagtgatacacattgattattccttttgaagaggtggttttttaatgttagtgaaacaaactcgtgatttaaaaagtacggtttatcaagatagtttggcaattcggcaagccgtattcattgttgaacaacacgtgcctgctgaacttgagattgatgaattcgaagaccaagcgatttattttgtcggctacgttgctgatcaagccgttgtgacgttgcggctcatcgaagcggactcagattatcatgttcaacgtgtcgcagttagccgttcagcacggcatcatggttatggtcaagaactgatgcgtgccgctgaagtttttgctcgtgaatcaggtaaagcaacgctcactttaaatgctcaattaagtgcagtaccgttctatacgcaacttaattttcaagcaaccgccaaaccacagttcctagatgccgggattatgcatcaagaaatggttaaaaaattaactgactaattgtcatttcaccactaaatgacttataatgaacacagcttaataacagaaaggacgttaccatgcctaagcaaaaatcacttcttgtccacttatttttcttcattatcccttatctactcgtcattacgattgccgcaacggcttacgacagtcttgtgattcacagtgccacttgggatcgcaccttgttcagtgctctaatcagcagcaccctaatgttatttattaaagttccaatcgaacgaccgttgacgattatggctgacttagcccctaaccaaacacttaaaatggtaacaagtttcttcctagtagaacgttcacttggtattaagattgctaacttcatttttgatggcatccttttctgccttgcaacttatctattacgccacttcttgccactcaacatcattgctggtagtttactcggctggtgcgtcttcgcgcttttgctatccatcagcatcggtgctggcatcggctttaaaacattaacgattcaacaagatacttcagtcgaaaacgattaacccatacaaaaaagccccagtcaatcaatgactggggcttttttgcttgagactaaatagtgttctaacgacggtgcgccaattcttgataccggttataccaaatatcaatgtattccttcgaaaagggccctttgccattgttgatccaatcaaccaaaaccttaacgttggcttttaaaatccgatcagtttcggcggaataatgccattgcgcactgtgcgcttcatattcatcgacatctagaagccgtttttcgccattggggaaaaccttcacatctaaatcataatcgatatacttaagcgcctcttgatccatgacatgcggcgatgccaaattacaataataagaaacgccgccttcacgaatcattgtcaccacgttaaaccaatacttcttatggaaataaataagtgccggctcccgcgtgacccactttctgccgtctgactctgtaactaaggtatgatcgttacaaccaatgactgcgttctcgctggtttttaaaaccatcgtatcgcgccaagtgcggtgtaaactcccatcgtgtttataactttgaatcgctatatagtcgccttctttgggaatactcatcgacatacccagctttccaaggttattattcataatcacctatcattatagcaaagactcgcaaatttacctaaaactttctaccattaattggttgccaaacgtgccgctaacttcttttgcacagtcggtaatgcaacgtcagctaattgtgcctcggtataccattggcctgggaaaaaggcgaggtcggcatctgctgcaagttgtgcttctaaaagggtaattgtccatttaagatgcgtaaaaacgtgcaccacaggttttaaacctgattcatgtaattgctgcaattctagcgcaaaagcctctttaaaataagcttcgatacgagctagttgttcttccggtgtcaataattcatcgtcagttacttgcaagtcttccgcagcgactagtggataagtggacaggttcgctaataaaccggtactcggtcgtttttgaaataataagcccctttgcgagcgaatcacaactgcaaacatcgcaattggtttttgttttgctttcttcgtcttgactggataatccaataaggtgccatcttgataactccggaaaaacggtgctaacgccgtctcaccaaccgttggattctttgccgtacaaacttgcgaaccaaaatccatcacggcttggttaaagtcacctgggcgatctttgggaatcagcggtaaaatcgcatcgtaaaaaatgtggcggttctttggattggcaatatcagcatcgattttcaataaccgactgaacacccgaaaagcattgccatcgattgctgggacaacttcgccaaaacaaatactggcgatagcgcccgctgtgtacggtccaatcccggctaacttttctaattcagccgcggttgttggccactggccattgtaatcgtcgacgacttggcgcgctgctttttgtaagttacgcgcgcgcgaataataaccaagtccctcccacgttttcattaataagtcctctggagcggccgctaagtctgccaccgttggaaaagtcgccaagaacctttcatagtacggaatcactgtttgaacctgcgtttgctgaagcataatttcagatagccagacacgatagggctcttgattctggcgccaaggcaagtcccggcgattttcatcataccaagtcataaacgcggtttgaaacgcgtcccgttcactcggtgtcatctgatagttcttgttcgtcgatgaagtggttgattgcatcaatattaaatcctttccgatacaacgcttgttgcatcttcatccggcgttctcgtggttcgagtaatcgataacggcgccatttttttgcaccaagttcagcaagcgcgtcagcttcactatcttcatcggcttcaagggccaacgcttcaataattaaactaaggctgtcaccgccaaaccctttttgcattaaaccttgtttgactttttgctgctgttcaaagaatgaactatgacggtatttcttcgccaacttcttagcagctgctaacccaaccgcaacttgatcatccactgaataatgactaagtgcttgatcgatatgggcagcactaacgcctttttggattaatttctggcggaccactttggggcccttatccgcggtattaatcacagtacgaacgtagctatcggcgtaatcctgatcgtcgatataatgtaactcgcgtagttttgccaagctagtctggatcccttctggagtgatctcgtgttcgcgtaaatattgcgttagttccttttccgtccgcaattggtgactcagataattgagcgccaattgatacgctttggcattatcatcgtctttttgaatgtcgcgttgcagttgactatcaatctctaaatccttcgctaaacggtatttaatcaagacactctcggtcacgccaaaagcgaattgctcatcgataaaaatattataacggcctgattttttctgtgccgttattttggtaatcttcggcatgttattctcccttgttacgtgttgctttgatgtttaaatagactttaaatccaatgaccacgacggcgagcactaaagtcccgatgatcagtggtaagctcttgtgttggaaggcataaacgccaattccgagtacaatcagcatggcgattaaaaattgatttcgttcccaaaaattcatgtggcttcgctccttactttgacttcctgtagcatagcataaatggcgcacccggacaaaagtcactgcttaattcccactattgaagcgatttttcagtgctaagtctgttatactgaatgcaatgagaaaaacgagtatcattattttatattaataggagcggattaaatgccagaacaaacaaaccaagtcgaagtcggccaacgttttccattgacgattaaacgaatcggcatcaatggtgaagggattggctattacaaacgcaaaattgtctttattccaggcgcacttcctgaagaagtggttgtcgcagaagtcaccaacgttgcccctcgtttcattgaagcaaaagtccacaaacttcgccaagcttcaccacaacgggttacccctaaggatgccacttacggccaagtcggtgggattgagcttgaacacttaagctatcctggccaacttgccttcaaaaaagacgtcgtcgtccaagcgcttgaaaaattcaaaccacaaggctacgccaaatacaatattaccgatacagtcggaatggaaaacccctggcattatcgcaacaaagcacaattccaagtccgcgaaatcgacggtcatttagcagctggcttatacgctccaagtagccatactttaattgatttgcctgaattcgcaacccaaaccgatttaacaatgaaaatcatccgaaccgtcttgaaattagtcgaatcactcggaattcccgtctttgatgaaactaagaatgccgggattttaaaaacattggtcgttcgcgaatctttttcaaccggtgaagcgcaactgaccttcattaccaactcccctaaactaccgcaaaagcacgccttgattacagccatccaagctgaattgcccgaagtggtttcaatcatgcaaaatatcaacaaagggaaaaacgtgctcgtttggggcgaccaaacgattcatctggctggtcaagaaacgattatggaaactttaaacggcgttcacttcgaattgactgcccgcgcctttttccaattgaacccagttcaaacggctaagatgtataacttagttcaagatgcacttgatctcacacctgaagatcgcctcgtcgatgcttattgtggggtgggtacaattggcttgagtcttgccaatcaagtcgcagaagtacgcggcatggacacgattgccgattcaattgaagcggctaaacacaacgccgccatcaatgacattcaaaacgttgaatatgccgtaggggctgccgaagacctcctcccagaatggttggataatggcttcgtcccaaccgccttggtggttgacccaccacgcactggcttagatcaaaaattaattgatgccattttagacagtcggccattgaaatttgtctacgtctcatgtaatccatcaacccttgcacgggatttaaaagcccttgtgcatacgtaccaagtggaaaaaatccaaccattggacatgttcccccaaacggcacgagttgaagcagttgtgacattaacactaaaacgcgatctataacgcaaaaaagcggtccatcaacatgtgtttgttgatggaccgcttttttatttggactttaatcgcctaaacgtgttctataagtcatatccttccggttaacccggcatcccgataatgccgtacactaagcgccaacgttggaataaacgtgagtaccccaagcaatccgataacgattatgtacagcactaatgcaccgttcatcttcagttgcacctttgcagcttgtgcaaatagcaaagcgaaaaatggcatgaaccaaacaatcattaaaatcaacatcgcccaccaataacccgcacgtgttgttcgccccgtaaaatcaaaataacctttaaaataatctcgccaagctgacttaaacgttacttgccctggtgtttcttgaatctcgcgcattgtgaatccccttccaaaactgattaacttaattgtaccgcatttcaccactaatttgatacaataaaggaaatcaacttggaggaattcctatgaaaatttatttcgcaaacgctctattctcagcagcagactttgcttataacgctaaggttgttgctcaactgcgccaagcaattcatggtatcgatatctatcttccacaagaaaacgccgcaattaacgacaagaatgcttatgccagctctgaaatgatcgcacaagccgatacagacgaactcgttgctagcgatctcgtcattgctgttttggatggtcctaccatcgatgttggcgttgctagtgaaatcggtgtggcatacggtcgccaaattccaatgatcggattatacaccgacagccgccagcaaggtgctacaaatccgcaaaaactagcagctttacaagagatcgccgaaaaccaattccattacttaaacctttacacaaccggcttaattaaacaaaacggcacgattgtgaataatttagacgcgttgattgaggcagtgcaagcccacgcctaattaaaaataaagccattcatttgttatctatagtgaatggctatttatattgtattttgagcataaaaaaaggattcaagctttgatatgcttgaatcccctaggttgaggttgatagcttggttgttacgagctgattctgttttacattctggataatgttacacctcatactttattcaattgtttttaatcgttggtctagcccactgctaatcgtttcactcgatctagtttggtcgtctatctttgacccgcatgtgcagttttagcgatgacgattaaattcgtgtttactacttgagcgatattctttaacagacatcagcctccgatatacttagatcttaatactacgaagagttacacttatgtttccattggaaccacgccttgcaatttctttttcgtactttaaatcttgatgtgtcgtacattcaaatctggtgcttgtgttttaaagtggtaaatctatttaaagctaacttggtttcacttaccaagctatctttcctcaccattaatatagcaccttctgtgaccggatacaatcaaaatgctcttaaatttaaaaaagtttttccatcatttctgacttgttatttttaaatactaatttagtgacactttcgacgtgtagcgtttgtgggaacatgtcgactggttgtgtgctttctgcttggtagccttgggctgccaatagttctaaatcacgcgccaatgttgctggattacagctgacatagaccatcttggctggttttaattgaccaacggcttcaatgaagctagcttccaaccctttacgtggtgggtcaacaatcaaagcatcgacttttaagtcatctgcttgccattgcgccatcacttcttcggctttaccgagtgtaaattcaacgttttcgatgccgttaatcttggcattgtgccgcgcatccataacagctgattcaacaacttcaacaccgtaaacttgcttagcatgtttagcgactgctaatgaaatcgtcccaatccctgaataagcatcaatgactgtttcgttccccgttaattcagcagcttcgattgccttgttatacaagacttccgtttgcactgggttcacttggtagaatgattgggctgaaatttcgaacttcaagcccattaattcatcacgaataaagtcgcgaccagcgattaattttgtttcgtcaccaaagatgacgttcgtttgagcagcattgacgttttgcatgatgctgaccacttctggtaaagcttttttgatttcaacggcgatttcacgggcagccggtaatttcttactccgcgtgatgaagacaatcatcatttcgtggctgtaataaccacggcgaaccataatggtcttcaaaacacccttatgcgtatcttcgttgtatggatcaatgtaaaaacgacgcaagatatcacgaatgaccttgatagcttcatcaatcttaggatcttgaatgtagaagtcttccattggcatcacttgatgactgtgtttccggtagaaaccagttgttaaagcaccatcgataaaccgaacaggaacttgcgccttgttccggtaacccgttggatcatccatccctaaaacaggttgcactggaatatctaaatgggctttttggaagacgttcaagacttggttacgcttgaaatctaattgggctgggtatgccaagtgttgtaatggcgcaatcccagtttgtgagtaaatgttagcttttgattcaacgcggtctgggcttttcttcaataaattaactaagcgcgcaaaaccatattgtttattgacctttgtgacttggatttcagcttgttcatcgggcaaaacgccttcgataaacaacggatagttgtcgactttagcgacccccatgccttcataggttaaatccataatatcaaccgtcaatgtttcattttttcttacaggtgcttgtattttcatagttacctctttttaattgtgtaaaaagagtctgagacaaaactgagttttgcttcggactcttttcttagctacaagtgtgcggtcaatccgcccacgttatccaatgttccagtttaacctattttaccatcgccgtctatgtcttcttcagaaattgcttcgacttcctttacgaataaatcttcggcagactgctgagtaggggtttctgatgtaatagcgtgatctggaatatcttccttattcacatacatctcgatatgttgttgcaagttagtaaaggtcattggtgcatcgccaccgtattcgccatctaaattaatcatcatcttaacgtcatcatcaccaggacgcgcaactagttttgacgtcttggtataaatgacccgtggatcattaacgtgtttgccacctttaatgacgagtgcgattaaatggactaattcggccatgttggctgtcttaaccacaatcaatgagaaattaccatcattcagttgtgcatccggcgcaatctgttcaaatccaccaactgaattggttaaaccgagtaagaatagggaagcttccccatcatacgtaccttcatcatattccagatgcatcttaatcggtttaatttggggtaacatctcagcaccttttacgacatacgcgagatagccaaaaattgacttaaagtctgaggggacttcataggtcaattcggttagcaaaccaccaccagcaatgttcatgaagtaattgtcattggcttgaccgatatccatcttaagcgtttggttcttcaaaatcacgcgggctgcttcaaccggattatcacgcggaatcttcaaagcccgagcataatcgtttgttgtcccagcaggaatcacggccatcattgggcgtttttccaagccggcaatgccgttgacgacttcattaattgtcccatcaccgccagcggcaacgattaaatcgaagttcacctttgctgctcttgtggcctctttttgcgctgaagcttcttcaggcgttgtttgaaaagcactcgcttcataacccgcttgttccaaaatatccagaatatcagcgacactacgtttcatcacttcatgtcctgaagttggattataaattaaccgtgcacgtttttgcattcgaatctcctaaaatatcaattatcgtttgttcaattcggccatcaacaaatcattgacaactttcggattagcttgaccccgtgtttccttcataatcttaccgactaagaacccaactgcgcggtctttaccgttcttgaaatcgtcaattgattgttggttgtcatctaaaatacctgtgatgattggtgtcaacttagcagggtctgataattggaccatgcctttagcttcaacccaggcttttggatccgtgtcattttggataatttcttggaagactttcttagcaatcttcgatgaaataatcccgtctttaatcaaattgatcatttgggctaagtgggcaggtgtgagggctgtctcttgaaggtcaatttgtttgtcgttcaagtaagcattcacttcacccatcaaccagttagaaacttgttttggtgcggcgccatcagcaacagctgcttcaaagaagtcagacatttccttggtgttcgtcaagacacccgcatcgtattcaggcaagcccaattcatccacatagcgtgcacgccgtttagccggcatttcaggcatattgtcttgaacttcttgtaaccaatcatcaccaatgtgtaatggtggtagatctggttctgggaaataacgatagtcatccgcaccggtcttaacccgcatgaggaatgtttcgcctgttttttcgtcaaaacgacgggtttcagggcgcactgtttcgccagcaatcaaaagttgtgattgacgcttgatttcataagctaaccccaaacggacgtgattaaaggagttcaagttcttcaattctgatttcacaccatattgcttcgcaccgattggtcgcacagaaatgttagtatctacccgcattgaaccttcttccatcttaacgtcagatgcgccagtaaattgaacaatttggcgtaacgtttcaaggtaagcataggcttcttcaggcgttgacatatcaggttttgaaacaatttcaatcaaggcagtcccttgacggtttaaatcgacatatgaatagccgtcagagccatgggtattcttcccggcatcttcttcaacgtgcaattcggcaatcccgatttgctttgtgtggccatcgacttcgacttcgatatagccatctttaccaaggggttgttcgtattgtgtgatttggtaagcttttggattatctggatagaagtaattcttccggtcgaaatgcgtatcgcgcgcaatatcagcgtgcaaggcagtcgcaaccatcatcccaagtgtgtatgcccctttattcaaggttggcaatgtcccaggataaccccagtcaatcacattcgtgttagtattcggttctgcaccatagtttacaggagatggactgtacatttttgaattggtttttaattcaatatgcacttcaagtccgattgttgtttcgaaattcattaggcttttcctcctttgaagcttggaacgttcttgttaaattgagttgcttgttcaaaggcataacctgcgcgataaacagattcttcatcaaatgctttcccaataatttgtaaaccaactggcatgccatctactaagccggcaggcactgacattgctggtaagccagccatgttagcaggaattgttaagatatcgttcatatacattgtcactggatctgatactttgcgacccaagtcaaaagcggtggttggtgttgttggtccaaccactaagtcgtagtctgcgaaaactttttcaaagtcgcgcacgattaatgtccgcacttgaccagccttcttgaagtaagcatcgtaaaagcctgatgaaagggcaaacgtccctaacataatccgccgtttcacttcatcaccgaaaccttcagaacgtgatttaacatacacatcttcaagtgtcttggcttcaggtgaacgataaccataacgaatcccgtcaaaacgtgacaagttagatgaagcttcacttgaagccataatgtagtaagtttggacggcatacttagaatttggcaagctgacttcgtcaacggttgcccctaatgatttcaaagtttcaatggctgtttcgatttgggctttaacgcctggttcgacaccttctgccatgtattctttggcaacagcaatcttcatacctttgatgtcaccatttaaagcggcacggaaatcaggcactgggatatcagcactcgtactatctttttcatcatgaccactgatggcttgtaaaacagtcgcattatcagcaactgtccgactaaagaccccaacttgatcaagacttgaagcaaaagcgatcgcaccccagcgtgacacacgaccgtatgttggtttgatgccgacaatcccattaaatgcagctggttggcgaattgagccacccgtatctgtccctaaagaagcaacgacttcaccggccgcaactgctgctgcagaaccacctgatgaaccaccaggtactttgtctaagttccaagggttctttgtcttcttgaaggctgatgtttctgttgatgaacccattgcgaattcatccatgttgtttttaccgatcacaattgcatctttagcttttaatttttcaacaaccgttgcatcaaaaaccggcgtgaaattttcaagcatcttgctggcagcagtagttgttaagccatctgttaataagttatctttaatcccaattggcatcccagctaataagttatctgcatcaattggttgggcgtccactttggcagccgcagcttgtgcaccagcttcatcgattgctaaaaaagcatcaacttgtggttctctcttgtcaatttcagcaactgtttcagttaccaattggctagcagttaagtcaccagccactaatttggcatggatactttgtaaatcttcatataagtagttcacggctagtcttcctccttatccataatggcagggactttcaataagccgtccgctgaatctggtgcattcttcattaaaatctcgcgatctgtgccagcttgagccacatcttcgcggacaatattttgaaggttattcacgtgggtcgtcactgggacacccgttgtatcaactttatttaattcatcagtcattttcatgatgtctgcaagttgttcagtaaattgttctaactcagcatcgctaaaagctagttttgaaagttctgcgacatgctgaacttgtgttttatcaatcatgagtaaacccctcttctaattctgtcacttttatccattctgattaattttaccatatattaacgtataagaaagtgacatcccttggaatttaccagtttttcctaatctttaccggtttcagcagatattgaaatatatttttactttctttttaaaagcgtaattgaatgttatgtaattcattagaaggcgatatgatttataagagtttatcatatacacgcattcttttaatcttatatcctgagtacagatgagaagttatgaataatgtacaagattatcattaacttatagatgagtgttataatatgaaaatcaatatctcggaacaccttgtagcagtagcagttttaagtttaatgggtggcattgtcttacaaagtacgaccgtttcagcagcgaccacttcggttggtgtaactatcactggtgtaacacctggaatggccgctaaagccaaagaagcagccgcagaacaagccgctttagaagaagcatggttacaaacagaaatcgatgacagcgaacctgtagaagttaccgaaacaattagcggtcaaacaactcactactgggaatcagcagatggctcacgaagcacaactgcccccgcgaaagttcaagacgaaacagtagccgcaccggaagtagcacctgaacaatttgaagaaacagcagttgaagaagaccaaccagccgaaaacttcaaaccaatgcctaagaaacatgacatcgatcaaaaagcaattgctttcaaacaactcacaacagattgggctagcaatcaaatcatgtcatcattggaagacttaatcactaaggctttccaacttaacaaataacactcagtattagctaagcggcaagtatcgtaaccaagcgtccccagttttgagtagtttcaaaagcaacactcaatagtctgtcggtgtaacttacggatttacccatactagaagttactaaactatttagaattgtttttttcctattttaaacgtttataaccactccactgctaaaataatttcattaaagtttgatgagttcacccaaaattttgggtgaatttttttattgcttaatgatttttcaaaaataagtctaattttaatagacatttcacaacttatttcatgctcataaaagaacccaaacctactgatagaagcaacttaattgattatcgggctgtattatcggtatccagtctgaactcccttcatgtaattttcatttacggcagactctggctagcctgattacagcagaacacctcaataggtgttatactcttaataacatctttttaaaaggagtctatcatgaaaaaatcagtccgtttaagcaatgccgtccacctgatgaccctgattgctttaaacccgtttgataacctttctagtcagcgcattgctaaaagcatcaatactaacccctcttttattcgccaaatcatgggacaacttaagacagctggcctattgacgagcgttaagggccatgccgaacccaaactaacgaaagctcctgaccaaatttcgctctgtgatatctataaagccgtcgatgatacccggttattgaacatcgatacccaaattgatcctagttgcggccccggacaaaatattcaattatcgcttgctacctattacgatcaaatccaagaaactgctgaacagcaaatgcaagccatcaaactagccgacattatcgaacaatatcaacaacgtctcgttgaaaatccagaattaaaactttacgaaaactaacacacaaaaaggttgggcaaattgcccaacctttttgtgtgttaatcctcagcggatacccggctgatgccgcactcttttcttttaaacgtgctctatcagccaaccgcttccggttaaccctgaatggcaaacaatcgctaacccggttattcaccattctgtgttaatcctcagcggatatccggctgatgccgcactcttttagatttgctagtacctttactaagtcatacttaactgcaataccgcggtccgttaattcacgtggcacaatcgcatctttgggattaacggtgatatatgttgcttgtggattttggtacgttagattcataaacggttccttaataaacatcggtgtcatcatacccacacctagttctaaatagaccgtttttttaccttcagctttttgaataaattgacgatactttgcgtattgattgttgtagtgctgaccttcaagaaattcataaccacggacccattccaacatttcagcaccacatttaaggcactgcggaattaagttttcgggtaaatggccattttcaatttgcggaaataattggtcaacaactgtctgattaggatagacttgatcatgacatttatcggcacattgaaaataggaccagtcaccctgaatcgtggcgacatctttatctggaaaagctttcgagaattgcacgtcttgattcgtcgttatcaaatcatagtctttatcctttaaaatggctttcaagtcctgatacggttggtaaactggttcatgtaaaacaaaatgaattaaagacagcttaaagccccataaatcgccgggattgtaccaatcgggaccagccgcagccgacatgtcggctgcggctcccacgatgacgtaatctgcctctttgagcgtcgttgccattttttgtagtgttgcttgatagtctaaattagtcatttttgaggagctccttaaaattatcatcgattgatccagcaagaccgattgaccgttgttcaatagctgcgggaatattgatttcgtgcggtaaattcaacgtgatgtaacggtaacttagactttgcgccaccaattgcatgaggagcgccttaattaactgattattagcaccaattcctaattccagaatcaccacgttttgtgaacgatacttttgaacaaatgcgttaaacttagcttgttgcttttgaatcatcggcattggattttgattgttaccaaaattaccttccacttcaaaaatccgttcttcgtcaaatccactcagttgaaaatgcatgttgccatttgatgtgacaacaaagtattcatgaccgcccaccaactgctttaaatcgcgaaagacaggtgtactttcatagtgatcaaccatataatcgaacaatactttgtaaaatgcatctctttcagccactgttggatagttgtaaaaagccccttgaagaatattcataatcccgtagcgttcataaaaagtcccaaagtgggtcataaacgcttcgtcgtgtgcaaaaatattgtaaccttccgtaattgatagcccattaccagcactaataatgacggcatccgcattgtctagccaattccgtgctgttttaaactcgttcatgatgctctcctttggtgtaataaataaaataacaacaatatgcgatattgttgttattttatttattacaaccactgacttttaaaggtccaaaaaaatagcgtcgacaactgcgttagttgtcgacgctatttttttgcctatcagtcataactgactgttgtcgcactctttaattaataactcccgaatacgtgggttgagaaccttttactgccggctgctcggcctacgtaagcttgcatcccctctgcagacgagattgaaatatctaatggaatattttgtggtaaatatttatcagcagcggttgcaatgtattgtgtgaaactcatgatttctgtttcactgtagaattgtgtattaacggtgatgttcatcccagccaatacaccatcttcatagtgtgcttgagccgtgacaccactcaagttcgggaagaaggtttggacttgttctttaaaactagtaaacgcgtccgcatcactttgattgaccgctttttcatcattaacgagtgggaaaacttggttggcttggttcattttgtgccatgaatcaatcgttgtactaccgtttttgctgaccccataagcgaagaaggttccgcccactaaactatccttaggtgcttgtttgtaaagccccaccacgatggttgtcttactcaaaccttttttctgccgtaaacgcgttaagaccttattggccatttgtttaccttgttgcgccatcatggcactagaaattttggtttcaaaagtagcaccatattgttccttggtatagtaatccacttgattcatcccaagaccaatactcatcccttcaagcgccccatctgcccctaagaagtcttgttctaagatttgttggagatacagtggattccgcttatccggttctttttcaccattatcttctggatttaagccaagtgtattatcttttgattgacgtgccaaccatttttgcgcttccgcggttttgatggtttgaccttcttggtagaggtatttatcagtagggaattgttttttagaaatgtttaataagccactttccaaactcttcacatcaaatgccgtgttactttgttgtgtggttaatccacgtgtctgacttgtcttgtattggttattatcaataaccccttcatacatgctgtcagtcactttcccggtcgtttgtagctttttagtcgacttagttgatgatgacgaactcgaattgctttgtaaacttgtacaacctgccaacaataaaaccgttgcggctgcaactacccataatttatactttgccactgaaaatggcctccttataagtcctaattgattcgcttattgcgccaaataactatctaggtctgcttcgttgataattggaatctccaatacttgcgccttggttaatttactgccggcatcttctccagcaatcaaaatatctgtttttttcgaaactgagccggtcactttagcgccgttatcttcaagttgttgtttcaactcaccgcgggtatattgcgatagtttaccggtcaagacaaccgtttttccgttaaagtaactatcactattttcagcttgtgcctttgtcaccccagtataggtcaggttgacttgcacttcagccaattcacgaattaaagtttgtacttgatcatcagcaaaataagtcgctaagctatccgcaatcgtctcgccaatcgtatcaaccgacataatttcttcttgatcactggccatcaaagcctccatcgtcaagaaatgttccgctaataaacgggctgctttggcaccaacatggcgaatccctaatccaaataataacctttctagcgaattctggcgactagcttcaattgcatttaacaaattattaatagatttttctttaaacttatccagttgcgcaagttgatcggccgttaagcggtataaatcggcaacatcatggaccaatccttgatccaataattgggcaataatccgtggacctaagccgtcaatattcatcgcatttctggaagcaaaatgcgttaactgttccttcacttgtgccggacacattgggttaatacaccgcaatgcaacttcttcatccaaatgaaccaattcatgaccacacgaaggacattctgtcggaatcacatacggttgactgtcagccggccgtttagccagtactacttgtgaaatttctggaatgatgtcgcccgctttgtgtaataaaaccgtgtccaacaaacggacatctttatcacgtaacatatcagcgttatgcaatgaggcgcgcgcgactgttgtaccagccaactggacaggatccatcacagcggttggcgtgacaacccctgtccgaccaattgtccattcgatgtcacgaacaatggttgccgcttcttcaggcgggaatttataagcaatctcccaccgtggcactttaaccgtattaccgagttggcgttgtaaagctaagtcgttaacttttaacacaaccccatcgatgccgtattctaagtcatcccgcgttgcttgatagcgctcgataaaggtctttacctctgtcatattatgacaaacttcagcggttggattgacgttaaagccgagttctgcaagcacttcaagcgcttcgtgctgggttgtcgcttgcacatcgtcaaaggtgacaatcgtgtacataaaggcactcaaattccgctcagccgctattttggcatctaattgccgtaaactaccagcagccgcattccgcgggtttgcaaatggcggttggccttctgcttcccgtttttcatttaatgccgcaaaagaggctttgggcatgtaacattcaccacggacctcaatagagactggcttggttaatgtttgcggaatcgccttgatggtcttaagattctgggtaatgtcctccccaatcgtcccattgcctcgcgtcgcaccacgaacaaattgccctttttcatagatcaagtcaatcgcgagtccatcaatttttaattcgacattatattcgatggcatgctcaacgtttttttgaagtcgattatcaaaagtcgcgagttcttcctcagaaaaaacatcgcccattgataacatcggtacttcatgcgtcactttcttaaagccaggcagaacttgatcaccgactttttgagtgggcgagtcattagtaacaatgattggaaaggccgcttctaacgtttctaagtcgcgatacaattcatcgtacacgtgatcttcaaccactggggcatctttggtgtaataggcttcgctgtattcagctaatgtctggcggagttcttgggccgccgctgccgcttcagtttgtgtatattgatcgattggtttagctaatcccataatgaagactcctcactgtttatgatttgaaacgtgctttttaaagctgactcttgtgcttagcttcgtattgcaaacgaccgactttgtcggtcattcacaacactgtgctaatgctcagagtcaaatccgctttaaacacactctgttttgaaacgtgctttttggttgcaacaacttccgcttagcgctactcgtcaaacaactgcttgcagcagttattcgccgagttgtgctaatcctcagaagataaccgtcggaaacgcactctattctactttttcaattggtgcgaagcttgctagtagtcttttaacgccttgttctttgaaggcgatatctagttcttggtcgttgccggtcccgttgaccttgacaactgtgccaatgccccacttcttgtgttggactttttggccggctgtccaagcaccgctgttatcgccgccagttgtgtcggcaatcttgtgactcgtcgttgttttatttgcattatacgttgtagccgttgcgcgtgcataacgattgctcttaccaaatggcacattgcgttctggaatactgccagcattgccatttgcgtaatccaataatttatcatcgatttcgccgacaaatcgggacgcttggttactttgttgacggccgtataacatccgtgaataagcgttggttaagtacaatttgctttcagcacgggtaatcccaacatatgccaaacggcgttcttcttccagttcgtcttcttctaataaagcacgtgatagtgggaagatgccttcttccatccccatcaagaaaacaactgggaattcaagtcctttagcagcatgcaaggtcatcatggtcacttcactggcttcttcttcgactgaatctaaatcagagaccaatgataattcggccaagaagtccacaaataaatcactgtcatcttcttctggttcataatgttcgtcgaattgtttggtaactgagagtaattcttcaatattttctaaacgactttgtgcttcgagggtgttttcaacttcgagcgcttttttgtagccagtcttatccaataattgttccgttaattccgtcacgtttaaaaattcgcgcatcttcgctaagtcaccaatgacgttgccaaaatcgatcaacgtcttgcgactcttacctggaatggttgagagttccgcattttgcgctgcttcaagtaatgaccattgatgatcatccgcgaattgcgttaatttttcgagagtgccggggccaattccccgtttcggactgttaacaacccgttcaaaactcattgaatcagacgcattcacgactaggcgtaagtaagccaagatatccttgatttctttacgatcgtagaacttatgcccgccgaccatcttgtatggcatgttggctttgacaaacgcttcttcaattgaccgtgattgggcatttgtccggtataaaacggcaaagtcgccgaatttacgttggttcttttgcatttcttcttggatcttcgtaatgacaaagagtgcttcgtcacgttcactttgaccccgataataagtaattggttgtccttcgttattttcagtccacaattccttaggtttacgatattgattattgttaatcacaccgttggctgcttctagaatcgttttggttgaacggtaattttgttccaacatcactgatttagcatctggataatcatgttcgaagttcatgatgttgtccatgttagcgccccgccaaccataaatactctgatcggcatccccaacaacacagagattcttgtatttctcagctaacatgttaaccaatgtgtattgcgcttcattggtatcttggtattcatcaacgtggatgtattggaatttttcttgatagtgttcaagcgttggtttgttctctttaaataagcggatcgtttgcatgattaaatcatcgaaatcgagcgcttgattttgttggagtcgtttttgatattcggtgtagcattgggccacaattttttcgaatggtccgtttgctagacccgcatagtcgcttggtgtttggagttcatttttggcgttactaatcgtgcctaaaatcgcctttggttcaaacttcttcgtgtcgatgtttaaatcccgacaaacatggcgcattaacgtcaattgttcagaaggatccgcgattgtaaacgcgcgattgtagccaatttgttcaatctcccgacgtaaaatccgcacacaaagggcatggaaggtagatacccaaacatcttgagccccttcgccgagtaagttaccgacccgttcacgcatttcacgcgccgctttattcgtaaacgtaatcgccagcacgcgccatggtaaaacgtgcttttcttcaattaaataagcgacccgatgcgttaacacccgggtcttcccactaccagcacccgccatgattaaaagtgggccttctgttgtgaggaccgcttcagcttgcttatcgttcatcccttgtaacaattctttttcagacaaattagtcatccttccgtaaatgcaatcagcctatattataccaaactagataggtagaaaaaagcgaacacgacctagtaaaacggattctaatttttcgcaatcttctgccttgacctgggacgcgtttcataaattatactcaccttaatccaagaaaggtggtatgcatcatgattaaatacattttttctaacttagacggtacattgttaaaccaagacggacagctttctgaaaaagatattgcggctgtcaaagcaagcccactcccaatttccttgatttctgcacgttcaccacaagaaatgcaagctacgattgatcagttagcgttaacgacaccccaagtcgcttttaacggggggttaatttatcaaccgacagatcttttcccaatggttttagcagaatatccacttgcaacctctgctgtcgcaacattaattgccgcattacaatctgaatttagtgacatcagtttaagtgcgtatgacttacaccactggtacacgcagacaattgacgctggtattgaggcaatcgctaagcaaaccggtcaattgccgacgctcatcaattttagtgatcaattgcaaaatccatttctcaagcttttcaaaattcaactgattatgcaaacgacacaacaacgggcaactgttgctgatttcatcaaccaatgccacttgcctggtctttcagtacaacaatcaggtacaatgaccttagaaattacgagtcatgaagccactaaagctaacgcattaaccaccatcttagaaaacactggactaacagtcgctgattgcgccgcgtttggtgaaggtcaaaacgacttagccatgttatcgctagttggccaccccatcgtcatgggcaatgccagtgatcaaatccagatggcgggtcaattcattacgaagactaatcatcacagtggcttcagctatggtctaaagaaatacattactaaagttaatcaaaaagtaggttaggattatgccaacaattcgtgatattacccgcaaaagcggctattcggtttcgaccgtctcccgtgtgttaaatcatcaaaaatacgtctctgaacctgccaaaacggcaatcgaagcggtcattaaacaactcgattacgtgcctaatagcttagcgcgcgatttaagcttcggtcaaaataaaaatattggggtcgtcctaccgcacaatgaccatccgtatttcaaccaactcttaaacgggattatggatgccgcgttttcaagcggctatcacgttgtgctcctaccttccgaatataatcaagcagtcgaactagattatctcgaacaattaaaacgtaagaattttaccgcactcatttttacttcacatggtattgcactctcagtcttagcagagtacacgcgttatggtcaaattgtctgttgtgaagacccggggacccatcatatctcagccgtttattctcaccgtgagcccgcctatttagcggcattcaagtaccttaaagcccacaaagcacagcaaattggtctactattaagtcgtaatttagcgcaaagcccgacctggattgccgtcacgaacgcttatcaacaagttttcaactgccaacctgattccgagttaatggtcgatggcatgcgttcatttgaagatggctatcgtgccgctgaacaactggttgaaaagcagccaaccctcgcttgctattttacaaatggcgacgacattgccgctggtgtccgccaatatcatctgaatcatcaactgccgaccccgcttttaattggtcaagaaaaacaattatccagttttttattgcaactgccaacaattgaccatcacttcttcaccctagggcaaaaagcgtttgaagtcgccctcagtaaccatcaccaagtttgtcgtttcgaatcagaatttattttgccataaaaaaagccaccttaacctaacttttaggctaaggtggctttttatgtcggatgcttatgcaaacacccgatcaaaaattgtttgaacttgttttaagtgccattggtaatcaaaggcgtcgtctaaatcggcttttgaaagttcactcgtcactttcggatcggcttctaataattggcggaaatctttttgttcatcccatgctaaggctgtcttcggttggaccaaatcataggctgcttcacggctcagacccgcatccactaacttcaacaagacacgttggctgtaaattaaaccatgggtgatgttcatgtcagccttcatcttttcagggaagaccgtcaacgtcttcacaatccgcgtgaagcgattcaagatgtagtccaataaaatcgtagtatcgggtaaaataatccgttcagctgagctatgtgagatatcgcgttcgtgccataatgacacatcttccatcccggtaatcacatgaccgcgaatcacacgggctaagccactaacgttttcagaactaattggattgcgtttatgcggcatcgctgatgagcctttttgacctttagcaaagaattcttccacttcgcggacttctgttcgttgtaaatgccggatttcagtcgcaaaatgttcgattgaggtcgccacgaccgccatcgtgttaatgtaatcagcatgtagatctcgtgggagcacttgcgttgaaatatcttgggcccggatccctaagtgttctgtcacataggcttcaatttcaggcggaatattggcgaaagtcccaactgcaccactgattttaccggcttcaacgccttttgctgcgcgttcaaaacggtcttgattgcgtttcatttcagcataccaggttgctagttttaacccaaacgtcgttggttcagcatgcacgccatgcgtccgcccaatcatcacggtattttggtattcgtaagctttatcttttagaacggccataaaattggcgatatcagcccggattaaatcgttcgcttgtttcaaaatatacccttgtgctgtatcaacaacgtccgttgaagttagaccatagtggacccactttttttcatccgctaaggattctgaaacggcacgggtgaatgcgaccacatcatggtgtgtgatggcttctaagcgattgacttctgccaaatcaaagctagcattcgcgcgaattttctgcgcatcctctgtgggaatatcgcctaattttgcccacgcttcgacagctagaatttcaacttccaaccaagcttgataccgattttccgttgtccaaatggcgcccatttcgggacgtgtataacgttctaacataaacttctcctccaaatactacctaaatgctggtgatggtaaaacgtgctttttgtggcatctttctgtgcttaaccaaatttgccaaattcgcgattgcatcaccaactcgtcaaatccagttaatgctcaaaagataaccgccacaaatgcactctgttttgaaacgtgctccatcgggcatctttctgcggctagctacgtccgtccaacgatcgactgcgtcgctcattcgccggcctatgctagtcctcaaaagataaccgcccgctgtcgcactctaatataagtctgccgctccgtaattatcgattaagggttggatggcttgtccggttgctgtgaccgatccaatctgttgattggtcgtgacgttgtgcaaattaaagtaccaatccggtttgatcttcatctgtgtttgaattaatgaccgttgtgcttcttgaatccctaaggtcatccccgcattattgaggcgtgatgggccgactgccaactgacagatggccttcagatgatattcatattgcgagaaattcaaggtatgtgtcaagacatcgcccgttgcgtgcggtgttggcataattcgtttcacataaatattcatagcgggtgttaaaaagaattcaaccccaaaaacacctgtatagtctaatttttccccaattaagtgggctaatcgattaatttcagtcgcaacatcttgattaatccgtgctggcacaagcgacattttcaagcgatgatcttcaaactcattttcgatgactggcagtgtcacacacttaccatcttcagttttaacgaccatcactgatagttcttgtgcgtcgggaatccaagattccaaaatataagtccccaactcaagggcagcttcaatgttttcaaggtcactcggttgttgaataaaacgttgatactgcttaccgtaacctttttgaatgggttttaagatacatggatatccgattgaatcgattgcatcttgaatatcatctacatcaacaactgtcgcatagggcggaatattgatatttaaatcactcaaaaagactttttcgaggtaccgatcttgcgtcacagacaacacattactgccttgaggtagataataatgttgtgccagttgttcgagcaccgtctcatctaataattcattcgtataggtcaacacttgactgacttcaccgagttggactaatgtttgataatcattgaattcaccatcgatctgactatcaattaaacgtgcaaatgaggtattttgcatctgcggggtcacaatcgcggctacccgataccccatttcttttgctttgagcgccaacatataggcccgttgatcatttccaataattccgatggtttgtcctggataaataactggcatcatattacctgctttcctgttcaccaaactgtatacccttattatagcgaatttaagcgttgtctgcctaatactttcctccatgataacaaatttttagacaaaaaaagagtgcctctcagcactccgttaaataacatttatttattttcgtctaaaaagacgacttgaccgtcttcaaacgctgcaattcgtgctaaagattccacttgaatgccgcgttgatctaacaattcgcgacctttttggaaagtcttttcgatgacaatcccgacaccttcaagttgtgcgccggcttcttcaataatagaaagtaagccttcaaccgcttgcccgttggctaagaaatcatcaatcactaaaacgcgatcgtctgcattcagaaacttcttcgaaattgaaatgtggttattcactttcttcgtgtatgaataaaccgttgcgctatacatgttatcttgtaacgttaaactcttgtgctttcttgcaaaaacaatgggaacgtggaatgctaagcccgcgaaaacagcgggcgcaatgccagatgattcaaccgttaggattttagtaatcttcttatccttaaataagcgttggaattcttcacccattgcagccattaaatctggatccacttggtgatttaagaagttatcgaccttcaatacgtcttgacctaatacttgaccatcttttttaatgcgttcctctaatagtcgcacgctgagctctcctttgtagcatcgttaaacatcactaccgatagtagtaacgactaataatgttttctgaaattgaattaaaaatagattaccacaaaaaaagcaacacaacaagctcaaatccagttattcagcgatttgaaaagagcctgtcacaaaccggaatttgtggcaatctcttttgagattaattagtagcagatttcccatgatttgtttcatagcattctttattgatcatattggtcgaggtggtaagccttaacgagctcaattaacttcgctggataatcagggtcagtcgcatagccgtcttgttgtaatgcatgggcagcttgctcataattagtggccgcgattacgtgtgcatactgcgtccggttccaagaggtcccataagcaaacaattgtacatggtcaagcatcgattcttgataattgttatatactctaaaacgcgctgttgtcgttacccactgaccatttaaatattccttggtcgtcatttccttggtgttggcctcattatcacccttaataccgaaataattatggtattgcgcagcaagtgagctcttcccccaatcactttctaaaatagcttgcgctaaagtaatacttggtaaaacatgatatttcgtctgtaattcttgggcatatggcaccatttttttaataaacgcttgcttcttagcttggcgcgattgttgttcctgtctggcttgatcggcaagttcttcttgggccttttgtccattataccgaactaataaaacgagcccaattccgagaataaatagactcactaaaacgaccactagccaatcggttgggtggcgtctcttcttagaatagtagttagctgttggtttgcgttttgtcgtcttgcgtttacgtttttttgccaatcctctgcctcaactttatctgaatctattctatattgtacacaaattcattcagaacaccaatctttaatttgtaacccccctttaatttctatttagcgcttttattgctataatattggctgtaaccgattacgatagtaaaggactgattttattgacaacgcttaactggggaattatcggcttaggcaatatcgccaatagtttcgcaacttattttaaccaacctgatggtcacatttatggggctgcttctcgttcactcgataaggcacaagcctttgccgaccaatacaatattccacatgcatttggtagttatgccgacatgctcgctgatgacaacatcgacatcgtctacattgcaaccccccacaattatcacttcgaaagcattatggcgagtcttgaagccggtaaacacgtcttctgtgaaaaagcgattacgatgaaccgccgcgaactcaatgcagcaaaggctcttgctaacgaaaagcacttgatattagctgaagcaatgaccatttatcacatgccattgtttgctgagattgaacgccaacaagtcgctaatcacttaggcgctttaaaatcaattcaagtctcttttggaagttataaagagcttgatccaaacaatcgtttcttcagtcccgcacttgccggcggtgcaatgcttgatattggtgtttatgccctctcatttgcacgtcggatgttaactgctaaaccagaacttgtagcgacgcaatgggtgccatcagaatccggtgttgatcagcaatcaacattacttttaaataatgccaagcatgaaatggtgactgttaccttaaacattcatgcgaagatgcctaaacaaggtgttctcgtttatgaaaatggctatgtcaccgttgacgattatccacggcctgacaaagccaccctcactttcccagatggtcgcgttgagaccattcaagcgggtgacgcaaccaacgcaatgaactatgaactccatgatttccaagaaacagtgcgcggaaatcaatcaaacgataccctcgaattatcaagcgatgtcatggacatcatgtcagacgcacgtgctgaatggggctttgtctatccatttgaaaaacgcactgatctcgattaatccattcaaaaaacctggccaatttggtcaggtttttttagagtattttagcgagaaccaccatatcttttaggcgaatcccattttcatagattggcgtttgatattggtcgaagaagtttttgcgaatttgttcgaaccgaaagccttgacgcaaataaaaaccaattgctgccaaactgccgtccccagtgccaactagcaatgattgaaacccttggtcaattgcaatcgtctgaatttgagtcatcatttgcccaccgaatcctcgatgctgccattctggccgtaccgcaatatttttaagttctacctgttgattgttgagtgccatcagatggaagaccccgatgacttgctgctgatcgcttacggtgtaaaattgcccatgcatcaaatagcgttcaatcatgccgacttcttcatccgctaacaatagatcatccagccactgtcgccgtgctgcgccctcaatcaattgatacgttaacatctccagctcaccacccaatcaaaaaaggggtcgcgacaaaattgcttttgccgcgacccctaggttaatttttaaattagtttttgtttacgttaacagcttgtgggccgcggtcgctttcttcgatatcgaaagaaacgctttgaccttcttcaagagtcttgtagccttcaccttggatagctgagaaatgtacgaatacatcactaccatcttcgcgagttacaaagccgtaacctttttctgcgttaaaccattttacagttccgttttccatgagaaaaatcctccttgtgtcgatgacacattataaatttgtgtatttctggtggtccgatggaagaaagttcttttggaaacattcgtaccgcaaccattcaaaaagtacaaacatagtgtaacacaggcaacagccattggcaaccatttggcaataaaaataaaccgttttctatcacggacaatcagcatccgtgtttttagacaagtgttattttatatgttgaatcatgccctaaataatttggctttttgctttaattacgttaagatagcagtataactttttctcattggagtgcttgcttatgctaaaactattgaaacggctattaccaattatcttcatcggggtgagcctagccgcttgccaaaaaccgatggatactaaacatcaactccaagccgatatgcaaaccgttgaagatgcgactaagcaacaacgaacagctctttcaaccctcgaaacaatcggcgatccagttcctgataactatctcacgattcaaaaaaaatatcccgacgaaaatctattaacgattgaagatactaagattgcgacgactgcggccaagcgcgaagcagcctttcaaagtcttaaagaacaacaagctgtgctcaaaccggtcattaaacgcctcaccaaactggtcaagcaagaaaacgatgaattgccgattgaacaagtcaaagatttaaatcaaagtcttaagatttcgacacttgattatacaaccttggccaccttctacaacgcggccactaaagcatctgatgaattttacagcgaccatacagatgctgatgcagacgaagacagtcttaaatcaccaatcaatcgtttaaatcaatattacagttcagtttatcaacaagccgaaattgctaaggtcaacatgaacacagttgctgcgcatgctaagaaagtgcaaaaacaactggaataaacaaaaaaggagttggacaaagtcacgtttgtccaactccttttttcaatctttaattattcaacccgtggcggaccacaatcgtcggctgtagctacccgcacttgttattgcgtccgtttaaaccgcatgagtggtgttgcgactagtggtgtcaccacagctgctaaggttgcttccattacagcatttaacgcaacaacgccaagcatcacgatgattaaatgggtcggatcagtatgatacatccctgccgcttggtgtccgtaaagcacacgcgttaagccaatcactaaaatggtattgattaaagccccgaaaatcccagctaaagccattgcaccggttttacgaattttagtttgatataagtgttggaacgtaaagccagcaatcatcccagccatcaaccgcggtaaaatagcgataattggattttgaaagattaaaagtgaaagcggatcgcctggagaggtataggctctaaataatgaaatcaaaccccaaattaatcctagaatcgccccttggcgtgtgcccaggatcacggccccaataatgaccgttaaatgaattgttgttacggctggtagcccaggaatgatattaatataaccgaccatcggaataaaactttgaatgattaaaaaagcggttaaaatcgccataatactaatcgtataagctgatgaatttttatgtgtcatcctaactgactcctaaactgaatttattgctcattatagcgatttgtcaccctagtttcaatcatttacatcaagggacaaaaaaaggtaattccaattggaattacctaactgaattatgatgcgggtgagaagactcgaacttccaccgggaaaattcccgacaagatccttaatcttgcgcgtctgccattccgccacacccgcgtaacttgctttatcactttaagccacgtacattagtataagagaaacgatgattgaagtcaattaaaattttactttggagacgattacatgcccattatccccgctaaactaaccgatattgccaaattaaccaccctgtatcaacaattaacgactgaaatgcatgtgctacaacccactaattaccaagctgattacacgcctgagttctttgactggcaacaaatgataactgatccactacaagcagtctttgttcatcaaaaccaagatgcgcaaatcgatgccttttgtcacgttacaacagcccaaacaagtccctcacccttgtttatcgcacaccgctttgcttatctcacaacactgtatgttgcaccagaggcacgccgccaccacgtcgctacacaactgctatcgtccgcaaagcaatggcaacaaacacaagcgctcgattatttagaactaaccgtgttaggaaataatccggctgcgttggccctctatcagaagctgggctacaccactcagaatcaaactttacgcgccaactaaaaaaaggccacccctaaacataggggtggccttttttcattgaatttgtgtggtttgataaatcagtcgtccatgacaccgccgacaaacatagcgagccgtattcattcgacggcgacgtggatagacttgcccacagtctgagcatttataaatcacaattttgctcgatttagctgtcttttgtgcagctggtgcatagcgcgcacccccgacttgtgcaagtaattgtttaaactctgcgtctcgatgacggtaaccgcgatgcaacagatgcaggtgataatggcaaagctcatgcttaatcaccccttctaaggtctgtgtatcatgttcggtcaacatctttggattgatatcgatatgatgatcctgtaaatgatagcgcccgccggttgtttttaaacgccgattgaaatttgcttgatgcacaaacggccgattaaaaaactgcaacgataaccgttcaatcaattcagttaaggcttgatcagtcatttgcctttggcgctttcattgtcagttgtacgcgttcacgttcttgatcaacactcatcacccaaacctgaacgacgtcgccaactgccacttcatcagaaggatgtttaacaaagtggtttgccagttgagaaatgtgcactaagccatcgtgtttcacaccaatatcgacaaaggccccaaaatcaatcacgttgcggactgtgccttctaacgccatattcggtttcaaatccgccaaggttaagacatcatgacgtaacaatggcgccgtcatctgatcccgtaaatcacgccctggtttttgcaaactacttaagatgtcggtgattgtttcaatcccgacctctaattcagccgctagagccggtacttgcatttgtgcaatcgccgtcttcaacgcatcgcttcctaaagcatcaacggttaacccaaatgatttcaaaatggctttagccgttggataactttctggatgaatatcagtattatcgagtggattgtccccattaataatccgcaagaatccgaccgattgttcataagctttaggccctaagcgtggtactttcttcaaagcactccgcttttgataaaggccgttttcattgcgatattgcacaatgttttgagcagtagttgctgacaaccctgagatatgttgtagcagctgagggctagccgtattcaggttgactcccacactattcacgacatcctcaatcactgtatcgagttgcacagtgagctctttttgcgccacatcgtgttgatattgtccaacccccactgcttgtggatcaatcttgatcaattcagctaacggatcttgcaaacgacgggcaatactaatcgcacttcgttcttcaacgtgtaaatctggaaattctgcccgtgctgcatcactcgcagaataaacagaagcccccgcttcattgacaatcacatagaaaatttcccgggaaatagatttcaaacacgtcgttacgaattcttctgattcacgactcgcagtcccattaccgattgcaatcatttcaacttgatatttctcgagtaaagcagtgaattcatccgccgcttttgatcgtttgtcagctgaagctggtttgtgtgggtaaatgactaacttatccaagaattttccagtgccatcgacaacggctaatttacacccagtccgataagcgggatcaaagcctaatacaactttacccttcaatggtggttgcaacaagagatgcttcaagttatcaccaaagacactaatcgcttgttgatcagctttctcctttaattgcttgcgtaattcacgctcaattgccggtccaataaaccgcttataggcatcttcaaccgcagacttgatgaccattgctgacgctgaatcttgtccatacaacagatcttggctgatccgactggcaattacttgatcgtcaatcataattttagctttcaaaataccttcgttttcaccacgattaatcgctaaatattgatgttccgctaccttcgttaaatcggcagtgaaatcataatagatttgataaacttgcttctcatcggctgcttcgtctttaacttgactggccaactgaccattttgccaagtatattggcgcacccaattccgatattttgctgtttcactaatattttccgccaatatttcatgaacaccagctaaaacagcagctgtatcattgattttttgatctggattgaggtaagcttcagcttttgccaataatgcttgttcggttaagctaggtaaccctgcgataaactgcgcaaaaggttccaagccggcttctttagcgatggttgctttggtccgtcgtttttgtttatagggtaagtacagatcctctaaagcttgcagttgcgttgccgtttcaatttgttgtttgagttttggcgttaatttttcttgttcagcgatatttttcaaaatatcggttttacgtttttcgagcgtcgttaagtattgaaatgtgctttcaatttcacgaatttgaacttcatcgaggcttcccgttcgttcttttcgataccgcgcaacaaacggtacggtattgccttcttctaaaagacctaacgttgctttgatttgttgtggtcgatactgtgttaattgttgaatcacaagattttgaatatcaggcatctgattgcactccttttgcttcaattaaaaaaacagcccccgacttgggaactgtcaactttcgccctaagcgattcttgaaatattttggatgtatttagaaatccgttccgttgctttgtcttgattcatttctgaagctgcaaaagcttgcatatcaacggtttgatcatcatgcatgcttgtaattaaatcttcacagccttgaatgaaatcagcgtaagcaccgattaaacgttggttgttccccatcaaacgagcgggcgcaacaactgttttgaattgtgctaagaattcgtgatattgatcaacaccatctctgaagatttgtgctgtcttttgatagtcttgttcgctcatttcggctaacttaccatcagcaacggctgcttttaaaggggtgaaatacttactcatcccttcttgtactttttcagtattatcgattaaatcgttgacagcttggccgtatttggcaagcttttgttgcgttttattcatgtccatcctcctagtttcctatggtttagtatactaatttcccaatcggcttgcaattaaaatattaaagcatgtgtcattaatagaaaaggcatgcttagttcatcaaaggacatttacctcattaaaaaaacgctagcgacaaaatctcgtttgtcactagcgtcgattattacctatcttctcttcaacattctactcgtccacgactgaccaaacattaactttgtcaataagtcgatacaagcgaaaataactaaataaagtaagaaactcaacaaccaattattttgaacgtgagtaatccgttccagaccaccaaagatgaaaagtgatatcagaaactgtaagaatatttgcatacgtaatcctccctacaaaactcactaacataaaagttatttaatcacctttattatagtttaattgacaagcactttacaaggttggcaacaaattatttagccattctccgctggaagaacttcacaatttccacaatcacaatcaatgagaatgaggctgctaggacaattccccattggtgaatatcgagatgtgacacgtggaataggccgtttaagccaggtaccataatcgttgcggctaacaggaggaatgaagctaagacagcccagttgaaagctttattcttgaaaaagccaactgtaaagattgattggtgtactgacttcacgttaaacgcgtggaagagttgaatcatccctaacgttgcataggccatcgttaacgcatcagcatgtgctaagccgctcgcttgatgcactgggtacgtaatcgctaaggcatacacaccaagcgtaatcccaccttctaagagaccttgatagataatcgcttggaagacaccgccggagaagaagtttgacttgcgcccacgtggtttttgattcataatccccggttcagtgggctcaacccccaacgcaatcgctgggaatgtatccgtcactaagttaatccataagatgtgcaccggttgcagaatttgccagcctaaaatcgtcatcatgaataaggtaaggacttcacctaggttagctgacaataaatattgaattgatttttgaatgttggcaaagactttacgaccttctttaacagccacgacaatcgttgagaagttatcatcggcaagcaccatatcactggcgccttttgatacttctgtcccggtaatccccatcccaatcccgatatctgcggacttcaaggctggcgcatcattgacaccatccccggtcatcgcaacgactttaccatgtttttgccaagctctaacaatccgcaccttatgttctggcgcaactcgcgcataaactgcgtactgactgacttttttagcaaatgtctcgtcatccatttgatccagttcggcacctgtcacaacggccgcatccgcatcttgttcaggtgtaataatccctaaacgaagggcgatggcttctgcagtatcccggtgatcaccggtaatcattaacgtccgaatccctgctgaatgcgcatcagttacagcttgtttggcttctggtcgttctggatcaatcatcccgactaaaccagcaaagattaactcatcttcaatcgtcggatcaattgttgctggtaagctatctaacggtttatacgctaatgccaagacacgtaacgcttgtttagctaaatcgtggtttgttttgagtaaaaattgccgttcatcttcatctaacggttgaacatcgccattggcatcaataaaatgactcacgcgtttgagtaattcatccggtgcacccttagtggtcattaataattgaccatctttggcttgatgaatcgttgtcatcagcttccgttctgaatcaaacggtacttcacccacgcgtggtgctgctgctagggcatcttggatcacgaaacctttatcacgcccataagcaattaaagccgtttccgttggatcaccaattaactggccatcctctgtgattttcgtatcgttggcaaggttcataatgcttaacgctaaatcatcgcctgccaagtcggctgatgcttcttgcaactgattattggtaaaaatcttttctaccgtcatttgattcatcgttaacgtcccagttttatcggacgcaataatgtcggtactccccagtgtttccacagcaggtaacttccgtaccaacgcatttcgtttaaccattttctgtgtcccaagggctaaaataaccgtcacaattgccggtaatccttctggaattgcggcaaccgctaatgagattgaggttaataacatattaattggtgattgcgcgtggcgtaagtagccgaccacaaatacaacagccgcaatgattaaaatcataatcgttaaactcttaccaagttgacttaaattcatttgcaatggtgttgtggtttcaccagcttgatttaacatcccagcaattttaccaacttcagtttgcatcccagtgcccgtcacaaccccgacaccacgaccgtaagtcacattactattcatgaatgccatgttggtccgatcgccaatcccactttcaggatcggttaacgttgcaacagtcttatcgaccggtaccgattcacccgtcaaagccgattcctcaatcttcaaagccgctgattctaacaagcgtaaatcagctgggacgatatcgcccgcttctaatagcacgatatcaccgacaaccagttcttcactcttgattttaacaatctgcccgttacggcgtacatgtgcgtccggggttgccatctcttttaaagcatcaattgcttgttccgctttggcttcttggaaaacaccaaaaacggcattcaagataacaacggcgagaataataatcgcatctggccattcatgtgctaaaaagccggcaatcattgccgctactaataagacgataatcatgaaatctttgaactgttctaaaaaacgaacgaacaagctttttcgtttagtctcagtcaactgattacgcccgtatttagcgagtcgttcagcaacttggtcttgcgttagcccatcagttgttgtggctaaactttttaaagtctcatccgttgattgggtaaagaatgaacttggttgatctgtcattgtcgtgcctcctatagatagatttcggggtaaaaaaagagacctatagagaattcaaagaatcccccataagtctcactaattaagataacaccagaatattgccttgttggtggcgttatcgcagacaagctgccagttactcccttatcgttaaactaattataagacagaaccaatctaaaacgcaagtaaaacattattctgacgtccaattaatttagcggctaaacgaaatccagccgattaacgccaaaatgtatcaaaaacagtaattggtaaatgccgcttgtgcgctgtcttttggtaccacttttcaatcttggtagcagcctcttctgccacttcacgaccctctaaataatcatcaatttgatcataagtgacaccgagtgctaattcatctggcaatgctgggcggtcttcttcaagatcggcggttggaatcttttcgtaaaggtgttttggtgcctttaattccgccagcatcgctttgccttgacgcttatctaatctgaaaatcggtacgagatcagcaccaccatcaccgaacttcgtatagaaaccggtaattgattcagcagaatgatccgtgcctaaaaccgcacccttcatttcaccagcgataccgtattgcgcaatcatccgcacacgtgccttgatattacctttattaaaatcactgactgtcacttctgtttccgccagtgcttgaaccattgcatccactgacgctttgatattcacacgccggacctgatccgcttgcatgaaatcaatggcagccattgcatccgattcgtctgcctgttcaccatatggtaatcgaacagcgatgaattgataggtttcatcacccgtttcagcacgcatctcacggaccgcttgttcagctaaagcaccgactaatgttgaatcttggccaccagaaatcccgaggacgtatgtttttaaaaatatattcttttttaaataatcttttagaaaatcaactgaccgtcgaatttccgctttcggatcgattgtaggttgggtctttaaggctgcgataatttcagcttgtaaaggtctcatgattaaataccaccttttttaaatgttagattgctaacttttttgaaacgcgcttccttcaacagctttgtccggcaaataagcgctaacgcacttattcaccagacttcactatactcaaaagctaaccgttgaatgaaccactctgattttggacttcttctttgactcttctgatttgggccattttgtgatcccatgtgcgttgtgaaaggtcaactgggtaatcttgcgggttcaagtcccgcttgtattcatcccataacgagtcgagattttcactacagaacttcttaatcgcgccaagttcgggtaatttgtaaacgcgttgcccgtgttcaaaaatcgtccgtagaattggccgcgcattaaagtccgtcacagttttattaatgtacgtgtaatttgggtggaacatataaattgaatcttgttccagtggatcttcatcccaaagcgtaatgtaatccccttcagatttaccatcaacttttttagtgattcgccaaacttgcttgcgccctggtgtggaaactttctcaacattacttgaaagcttgatggtatcgaccatctttccgtcgccgttttcaatcgaaacaagcttatagacagcccctagcgcgggttgatcataagccgtaatcaatttcgtgccgacaccccaaacgtcaattttggcttcttgcatcttcaagttttggatggtcttttcatctaaatcatttgaagcgtaaactttagcatcggtaaaaccggcttcgtccaattgttggcgcacgcgttttgaaatataggccatgtcgccactatcaatccgcaccccttggaagttaatcttactaccaaattcctgagcgacccgaatcgcacttggcacaccacttttgagggtgtcatacgtatccaccaagaaaacacaatcgtgatgcgtttcagcataagcgcggaatgcttcataatcattgcgatagacttgtacgagtgaatgcgcatgcgtcccactggctggaatcccaaaaatctttgaagcgcgtacgttacttgtagcgtcaaaaccgccgatataagcggctcgagtgccccataaggcagcgtccatttcttgggcacggcgcgtcccgaattccaaaacaggatccttgccgacaacggacttaatccgtgcagctttcgtagcgattagtgtttgataattgatgatgtttaacaaggccgtttcaattaactgacattgcgcaagtggtccttcgatttgtaaaatcggttcattcccaaaaaccaattcgccctcaactgctgaacgaattgttaaatcaaaatcaagattggctaaataatcaagaaaatcagctggataccccacctcatcacgtagataagcgatgtcactttcggtgaagtgtaagttttctagataattcacgatgtgttctaaaccagcaaaaattgcgtaaccattttcgaatggtaattttctgaaataacattcaaaaactgctgtgcgattgtgcaagtcctttttaaagtaagtaagcatcatattcagctgatacaagtctgtatgcaacaaaagactgtcatcagggtataagtttggcatgttaagctcctaattagagatatatttagtataactatatcataaaataaaagaggcatacaaaaaagacggtagaaaaccgtcttttttgtttgagactagaagaaacgccaaccccatttattaaaatactgtgccatggacttcaagaagatcttaaatcccttgaaactgcggtgggatgccattccataaaaatgagtgacaaccgcgtctggtacatataaaatcgtatgaccgctttggttaattcgatcacaaaggtcattatcttcgaaatacataaagaagcgttcatcgaaaccatcaatagcccgaatcacatcagtccgcgtaaacatgaacgcaccagatccatattgaatcacttgccgtcgatccgttaaatcccggcattcataagccgccaagcgtttttcaaatagcttcttaacccatttaaaaggtacaaagcgcagcatataatcgaagacatctagcttccgccgtactaaatgttgggtcgtaccatccggaccaacaatcttcggcgttagcatccctaagctatcattagcatcttgatccgctaaaatccgatacatctgttcaaatgcgttttgatttaaaataatatccggattgcaaatcagaaaataatcggatgccgtcagcttcaggttggcattatgcccatgaccgaacccaagattctcttggccttcaatgatttcaacatcatctgcagcataggcttttaattgcgccaaatactcaggtgttgacccattatcatgaaccaatacttttaccgggtattgccccaagacagttgccttgatactatctaacgtcttaaagacgtattgactattataggtcacaatactaatcgtcaccgttttatccagattattactcatcatctcatcctaatcaatttttgccataaatttttgtaatgccacttgccaggttggtacttcaaaaccagttgccttgaccttcgtcaaatccatgattgaatgtcttggacggaatgctttttgaggatattcgtctgatgttaccggactcacttctacgtctttatccttcaagatttcgctcgcaaattcataccaagtacatgaattgtcatttgaaagttgatacaagccatacggcacgtcgttttgaacagcgtataacatgaattcagccaacgtccgggtccaagttggacgaccgacttgatcactaacgactgttaaatgatcatgcgtcttcgcaagatttaacatcgtgtaaacgaagttcttaccatattcaccaaagacccatgaagtccggatgatgtagtatttgctcattgtatttgcaacggcttcttcaccagccaattttgtgcgaccatattcattcttaggtgcagctggggtttcttctgtgtacatttgatcattcgtaccatcaaagacataatccgtactaatgtaaacaagcgttgcgccgattgcttcagcagcattggcaatgttttgcgttccaaccacgttcactttgtaattgattgacttgccaggttcttcttcagcagcatcgacagctgtataagcagcacagtgataaaccaattccggcttattcttttcgaagtaagttgtgactgccgctgaatcagtaatatctaactcagtagcatctgtccccacgtattcaatttgattttcatctaataagtgccgtaattcggtccctaattgaccatttgcaccagtgattaaaattttcatagaataaatctcctctattttaattcatccttaacaacttgtaatgccgcatgaatcacttgatgcatatcgtagtaacgatattgccctagacggccaccgaagaccactttgggttctgtcaccgataaatcgcggtatgctttgtataagcggttatttttgtcgttattgattgggtaataaggttcgtcaccacgtgaccagttcgcaggatattccttcgtcacgattgttttattcttatcgcctttaccaaattcaaagtgtttatgttcgatcacccgtgtataaggcgtttcggcatctgtatagttaacgaccgcgtttccttggtagttatcaacgtccatttcttcggtttcaaagcgtaaactccgatattcgagttcccctaattgataatcaaagaattgatcaatcataccggtaaagatgactttatcgtattgatcgatgtagtcttgtttcttatcgaagaaatcaacacccgtttcaacatcgattaaatcactagccaacattttttcaatgatttgtgtatacccaccaattggaatcccttggtatgtatcgttgaaataattattatcatacgttaaccgtactggtaaacgacgaataataaatgatggtaattcggtagccttttggccccattgcttttcagtataccctttgattagtttttggtaaatatccgtcccaattaatgaaatagcttgttcttccaagttttctggttctttatcgcccaacaccttgcgctgttccgcaattttagcggccgcttcggcaggtgttgccacaccccataacttattgaacgtattcatgttaaatggcaagttgtagatttcacctttgtagttagcgactggactattggtgtaacggttaaactctgcaaattgattaatgtattcccagatttctttgttgctagtatggaaaatgtgggccccatattggtgaacttgaatgccatcaatttcctttgtatagatattaccagcgatgtggtcgcgtttttcaattactttaacgtggttcccacgtttggccgcctcgtatgcgaaagttgcgccaaagagtccggaaccgactactaaataattagtcatattattttctcctaaatctaaattattatctcaatcattaattaacgagtaactttctttactaatctgacaatatctctgttaattctagttctcaataatacaagtagcaatacatatacaattgtcacaataattgaattaactaccattgttaagaacaaactaggtaacacaattttaaaattcaggacagcaagaacggtcattagaaaagcaagtacatacctaagctgttcatgaactagataccgtaaatctgcttctttacgaaccatgtaaattctcatagaacatacgataaactcggttaaaataataaccgccgttccgccatccgatccccagatattaacacaaatcacatttaaaataacactaattaccgcacccacaattgccggaattgcatattgtttataatcaccattgaccaatgagaattgactgccaaatacttcaccataggaaataaaaatcattattaaaccgacccataacatattattcgtcattggtgtatatgatttcccataaaaccacggtacaaattcggatgcatttaccattagtaacatagtaaacagttgtgcaactaataatgtatagtcaagtgatgtttttaataactgatccactttttcattattagcatgattcattcgaagttggaccattcttggcattaaaatggtactaactgaagtaataagtgttactaacattcgcgcaatccgttgtgattgatcgtaataagttaattggacaggccctgcaatccaacctactagcgtactatcaaaattggtataaaattgaactgcaagctgtgggataactaaaatcatggcttcttttaaaaagattgacttagaaaagaaccctttaaaacttacttttgtgatgatcccctttaaattaagccagaaaataatatttgcaaaaaagatgcttaaactattaattaatacgtaataacctaaatcactaggtttctttacaaatataaaaatcattgcaacagaacatattttaattaaggtatttcgaacaacaacttttctaacttctcctaatcctatgaagacccaggaaatgtcaattgcgaatccaattaaatatggaatattcaatagcaagtatgttttatattcactgaacattgcaaagaacgtatacgccagaatcactaaacaacctactaaaaactgtattttccataactgtacaaagttactacctagttcacctttatctttgtgggattgggcaataattcttgaacctaattgattcatccccatcaaaatcacaaaactcagaaacatggaaatagacgtaatgaatgaataactccctagtgctcttgcacccaagacacgtgctacatacggtactgtgataattggcaatgccagtatcaacaactggtaaataccgttgtagattatattgttaagcgtctttttcataattgctccatatctttcaatatcctagataatacatccacattattgaccgtttttagcgtagttggcttccacggctgctttttctgcttgccaccagtcttcattgtcacgataccagtcgatggtatgttgtaagcctgatttaaaatcagtgaattctggttgccagcctaattcttcccgtaacttcgttgaatcgatggcatagcgtaagtcatgacccggacggtctttaacttgatcataagcatctttgggttgccccattaattctaagattaattccaaaacatctttattgttttgttcgccgtcggcaccgattaaataagtttcaccgattttgcctttggttaggattgcccatacggcgcttgagtgatcattcgtatgaatccaatcacgcacattttgacctgaaccgtaaagttttggtcgaatcccacttaaaatattggtaatttgacggggaatgaatttttcaatgtgttgataaggaccgtagttatttgaacagtttgaaatggttgcttgtaggccgaatgaacgcacccatgcccggactaacaagtctgagctcgcctttgatgatgaataaggactacttgggttataacgcgtttcaggagtgaatttttcaccaacgccttcgccgtgccctggtaagtcttcacgcaatggtaaatcaccgtatacttcatcggttgaaacgtggtgataacgcacattatacttgcgacaagcttcgatcaacgtatatgaaccgatgatgttcgtttgaataaagggtgaaggatctttcaaagaattatcgttgtgactttcggcagcatagtgtaccactgcgtctgtcttttggactaagcgatccactaattcagcgtcacagatatcgccaacaactaattccacacggtctgctggtaaaccggccaagttcgcacggttcccagcgtaagttaatttatctaaaaccgtcacgtgaacttctgggtggttattcaccacataatgcacgaagttagaaccgataaagccggccccaccggtaacaataatatttttcatagtgtgtcgatctccttaaatttcaccgtaaacaaacggattatctttttcaaattcagtaaaggttggttggttagcatcttttttagacgtaattgcttggtcaaaatcaattggccaatcgatgtttaattctggtgtcttgaatgaaataccgccgtcagcttctgcatcatagtagccatcacatttatacaagaagttaacgttatccgtcaaagtgacaaagccatgggcgaagccctttggaacaagtaattgacggtgattgctggcagaaaggatgtacccttcccattgtttgtaagttggtgaacctgcacgaacgtcaacgatgacatctaagacagccccagtcaccacgcgaattaatttcgtttgcgcagctttaccgcgttggaaatgtaagcctcgtaaaacgcctgcttgcgttgaaagtgagtgattatcttgaatgaaatcaatatcaatgcccgcttctttgaaatcgcgatctgaataagattctgtaaagaatccacgatgatcaccaaagacggctggttcaataattttaacgtcttgtaatttagttgttgtgacttttaacttacccatgattacttacccctaatcttcttttactaatcgcaataaatattgaccgtagtcgtttttcttgagtggttgtgccaattcaatcacttttgctttatcgatatagtgcatgcggtaagcaatttcttctagacacgccactttcaagttttgccgtttttgaacggtcgcaataaaactgctggcttcttgtaatgaatcatgggttccagtatctaaccaagcaaacccacggcccattaattcaacatctagctggcctttttcaagatacgctttgttgatgtctgtaatttctagttcgccacgtggtgaaggtttaatattcttcgcaatgtcgacaacttggttgtcgtagaagtataacccagtcaccgcatagttacttgccggatgttctggcttttcaacgattgatttagcatgcatattttcatcaaaatcaacaacgccaaagcgttctggatcattcacatgataaccaaaaacggttgcgcctgattctttttgagccgctctttggagcatttctgaaaggccaccaccataatagatgttgtcacctaagattaagcatactgaatcatcgccgatgaagtccgccccaatcacgaaagcctctgccaaaccattgggttgttcttgaacggcgtattcgatgtttaaccctaagtcattgccgttgccaaataattctttaaaccgtggtgtatcagttggggttgagataatcataatatcttgaatcccggccaacatgagcactgacattggatagtaaatcattggtttgtcatagattggaatcaattgttttgataaagcgcgtgtgatgggatacaaacgtgtcccagaaccgcctgctagaataatacctttcattttgaggactccttcatctttaaataagtattcagcattcttaagcgaccaatcaacatttcttttttgtttctcttactcatgccagtgacattaccaccgtgtcgaacatagtccattaaagtagcagaagtcgccgtaattttaaaatgattctttttagcaacaagaaacagccactgatcatgcatttcgattttttctggaaaaggcaacgcggcatctaataatcgtctcgaaatagccatcatggcaccagtataaccatttttaattaaattactaaatacactttggtcaacttggttatggttgtagtgattccatgactgatcaacaacctctccattctttccaataacagttgcatcatggacaattaaatcagcgtgcccatttacataagcatcttgaataatttccactttatcatcatgccattcatcgtcttggtcagaaagaaaaacaagattgcctgtcgcaagtcctagtgctttctcaaacgatttaattggtcccatattctgatcgtttcttttcagaattgtttgcccgttaaaattgaccaacaactccctcagtaaccccattgtatcatccgatgaacaatcatcgataatcacaatttcatcttgcgcggttaattgcttgataattgattttatctgtttgggtaaggttttgacaccattataagttgccatgcaaacagaaatattagtcactctgtctcaccaaatctttcatttaaaacggtaagaatgcatcattcttacccattttttcatttttaaaatccttgtaggctgtattaactagtttgacggcagcaaatctagaatattggccttttttctttaaaaaggcacccattgcatatctgaaatgttcataccgtaattgcttagctagaatttgttggttctcacaatgtaacttcatagtttgccaacgattacgataaccatagtagtccttccagccaattggacgattaacaccacttgctccgacactattattatctgttagatgataaatcttagcttggatattattgatcatttctgtttccttgcgaatacgaagtgagtattcaatgtcatcataccaaataaagaaattcttttccggtaagccaatcttctttagcacatcttttctcaaaaaaactcctacaaaagtagcaatatcaactggaaaattaccttcatagctcgttaagtcaattttagataattgtagccggtccaaatcatcaattttaacacgatgttcggttccaatttcaccatcttcgataacagttcctgtaaaacaaccgatatcggcatgtttttcactaagttcagccattttcttcatataatcttgatcatagactgcatcatcgtcagcgatactaatccaatcaatttcaggcaactcaagagttgccgccaaggccatattaaagccacctgcgccacccaaattatcttctgaatgaatgactttaatttgtgcgttatcgcgcgcttttgctttcaaaaaatctagcgtatcatcagttgattgattatcaacaaccactattttttcaactggcgcggactgctctaataaactatcaatcgccttttctaatttatccctacgattatgggtcacaataactgctgcaactttcaaattcttatccacgctttcttttaaacaataaataatttaataaatagaaatttctctgcttaatcagtaatcctaatagtttctgtttcattggcatattgactaatctcgcattttttatttgcttactaacaacaggcgtttctagataagtcttaaactcattttttctttcctgatatgacttagagttgcttagattacaaaaatctgcaaacaagagttcaatcgagagtctcaacatataagaatccaaaaataatgcgttatctgattgttgtaaccaatctactaaatcatcgttcagatcattcgaaactgtaatgaaactttccttaaccccttgtcggtaactattactaattgaattatcatgatcaattctatagtgatacagtatcgaatcaacaatgttaattctagggttcttcaagaaaacctcaatgctaaataacgcatcttctctcttaataattcctgctgggtaaaataattgattagcttctaaaaaagactttcgaaacattttggcccatggtgttccaagaaaatatccataaatgccattataataagcgccatccgaaagcgttgcacgaattaaatcatccattgataccggtgtagcgggaaatagcttatctttaggaaaactattttcaactttaccgtcttgatatactcgatcaaaaccaaaaaagataacatctgcgttagtacttgctttttctaacaatatttcttcaaatttctctgctaataagtcatccggatcaacaaaaagcagccaagttcccttagcagctttaatccccgtatttctggcaaccgatacgccctgattagcttgttcaatcaacttaaaacgcttgtcttcttctgaaaagcgtctacaaattgctactaaatcatctctagcgccatcacttattagtaagaattcaaatgaagttgtcttcgccaactttaagcgttccaacccagcctctaaaattgaattttcagtaccatagattggtaggatgaaactaattgtctccatcaaaatcctcctaaattttcaagtaactcttattagaataatctgcgtatgagtcgattagtgcaaatataattggatatgctagttgtaagctcaaaccagttgcttgaatcatatttgaataaatagttaatgcaaatattgtatttaagacggataacccgacaatgaaaaatcttgaattcaacttatataagaagtacagatacacgtatgcacccgcaaagataataatgacgtacatagtaacaccaatccaccccaataaacggtaaggactacttaatgctgtcccgacattcaattctggtgtaatttgttgaattttgacctctttataatctgaattagcaagtgctctcttaccaatgaaattgggcagtaactcaccaaaaaacatactatttacttttgaaactgttattttttcagtagtcttgctataatctacatttttttgaaagttagccacgggtgatgaagcgtaaatataaccccaaaagaactccttaggaatcttactacttttaaatttttcagttgcaccaccgatttgcataattgacgctgaatcaaaagctgatcgaccattttgatatgacgtgttcactcgtgcatttcccataacaccaaataaaaacagacccaccataccgaaaatcgctaaaccaattatatgtctaactttaattttcttccagattgctagaataaaaatggtaaaacagtttatcatcaccatcatgaacattccgcgattaacttctaaaacatacggaatacaacttagaacacaaagtagtatatattgatttctcaacttcccagttgaagagaggattagatgccacaagtaggttgttaaaaaagctgtcagagtgagtaaaaaaacgtgaactgtcggaattccaaattctgtataaccggaatccttaccttggagcataaactgtaatggaaaaccatgattgtaggctccttcagctaatgtgcctattaaaacaataaccactaaccaaacaacatttgttgtactcttaattttcttaaaagatatcacattacttttatagataaagtatcctagtacgccggctaacaagaacattacaataaaaaagaaaataacatcactcgaaaaacttggataaatactggaccagccaaaaaagaaacttagaataactgctgaaaaagccagaatgaacataaagaacggattaaccaaatcgttccctcctaattctttctacgcataacaataaaatgaatagcactgaggatgaagcccaatactgcaccatagatgatgcccataatagaatttgttttcttattactaaagcctattgttgcagttgtatcttttgaagcctggtcaatcacaactaacttactcttctcgtcatcatacttgatcacttcttttttcaaaagctctgtcgcatacttagcacctttaatactcttggcttgcgtagcgccagtatatttcacagctatgactttagatccgttgctactatcaattaacaaattatcgcttgaataatctctaacctctttagtcatagcctttttaaagctttgtgtcttacttaaactattaattgattgccaaaaacgctcaacatcgttatcaaaaataccgttaccttttttgtcttcgacataccccttgttaacatatactttagctgttgtttcgtaactaattgttgatttggcagtcatgatcccaacagcgccaccaatgataattgttacaaaaatgacccaccaatattttttaaaaacaacacccacagatttaaatcccacaccattttccatttaacttaactccgtttcttagtaatttaaaataatctattttattgtagcataaacagtgtctaaccactattcgttacctgtaaatctaaggaattctttaaagatttctagactttataaaatcttcaattattagcttgagattacaatggaaagcctctttaaacgaaactgcaaccattttttgaaacaaataaataaaagtaaaattaggtaactacgtgcgccaagtataaactagcacgtcgcttttccagcctaaccaccactcatacctaagtttaaaatcctaatgcattctagcttagtttcataggggtatcaattattagccaaattaaaaacacttccgatttaaattttatatttaccaggaatcagcttacatccacttttttataatcaatgtagttatctttaattagaccattttcatcatatttaaggttcgcgccagcaagcgatccatactcatctatagcaggcatatgcactgtttcacttgaaactccaggaatataaaccgggaaagcattgtaaggatatggaatttcaatttggtcaccgttgccatcaacagggttagctacatcttcaatcgttgtaacgttgttttgaccagataaaggaatcgaaaagtctggatattcactgcccggatcagtcaaatctgaaagccagtatcgtggttaaataatcaccgatttactcgtgttcgatttaacgctttcctttttctcagaaatacttgaactcgattctgaatcagaactctttgaactcgacttactatctgagcttgttgaagcactgcttgtcgattgtgattgcaacgaactggctaagctttcagaaactgagctcgcgccttcaattgcgcttcgtgggttcacaatcttagaagtcgtgttggctgtcaccgtctccttattcacagccaccgctaatgcgctaccaaatgactgtacgattgtagtggttaagaaaataattgctaaaattagatggacgactctcttttgcatatcaaattttctcccagttctaatgcctttaaaactttgttacatgataatttttcgatattttgactatgttcatcaggcataactttgacggtatcactacttccccctaggctagactcccaagaatgcctatgcaggggtgaatattagtcatctaaccatcattacccaagaacaatatgtaacgatataagaggttcacaactcatgagttatgacctactatcatggattttttaaagtcattacgtctaacttaattttgcttacaaatgttgatataccagtaattaagctggattcagtccaaaacaaaaagcgtcttccaaacattattcgttggtgtctggaagacgcttttttcacccttattgtcctttttgggttgtttctgcggttattggctcgatttggtattctttttcgatattatgggctactcggttgaagcttttcatcatttcgcgccgggtaacaatccctgtgaactccccttcatccgaaatcacaggcagataggggtgatcaactaagagatggagcgtttcttcaatatcatatggatctctaatcgtcacgacatcggtttgcatgacatctttaacggtcagcttccgcaaattttcgaaactgaggttattcaatccgagcatcgtctcggtaattaacggcatcgtcaacatccctttgaacttcgaatggttgtctaagacgggaatgctcgaatatttcaccgtggttagtagaataaacgcatgttccaaggagttgctttcttgaacactcgcaacaacctcaccgggaattaagaagtgttctttattttctaataataagttcgaaaatgcatctgaaatcatcacttggcctccaataaactaatgctacttttagattgtaacaaagagcaaacacaaaagaccatccatagctactaaactttggatagtctttagaattaggcgcgtttaaatgtaaagtgtaactgcgaaacgggttcgaaccgacgattgtagtactggatttgatattggtcaggtgtgacgtctacaacggcgtatgtccctttcaagtcacggaactgcccccgtggttgggcaatactgccagggttcaagagcagcacaccttcgtgcatttcacaggccaattggtgtgtatgcccatagaacgcgagattagcttggctttcttgggccgctaataaaagccgcattaaatcgccatttacaccatacaagtgcccgtgcgttaagaagattcgttcatttgcaactgggacaacaacttgtgctggaaattgaccattgaaatccatattgccttgcacaacggtcatttggttaaacaagggatcatcggttgttaattcagaatccccgcaatgtaacatggttactggttgatcttgatactgcgccactaactgcacgagaatatcgcgatcaccatgactatcactcacaacaacaaaacgcatactaaacagtcctttcggcgccaaggggcgttgtttttttgaaacgtgcttcttccgacatattcttccggctagctacatcagccaaatctaaacgtgatcctgccgtcgcacgctagtctttgatccattctttccatttatcttctaggttctcaattgcttttgcgcggtggctgattttatttttttgttccaccgtgagttgggccatcgttgcatctaattctggcacgtagaaaagtgggtcatagccgaagccgttatccccacgaggaatacctagaatttggcccttcacgttaccttcaacgactaaatcttcatctggtcggtctggtttagcaaaaaccaatgttgtatggaaggttgcggtccgcttttcagcaggcacacccgttaattcatagagcaacttcgcgttgttgccggcatcgttatgatcaccagagaagcgtgcagaataaattcctggacgaccacctagttcatcaaccattagaccagaatcatctgccaagacaggtaagtgtaagatcgctgcaatttgatccgcctttaggcgagcattttcttcaaatgtcgaaccagtttcatcaatgtttggcaattctgggtaatctaataatgttttgatttgaatcccttccgctgcgaagacggattcgaattcgcgggccttacctggattcttcgtggcaatcacgattgtttgttcatcggtatcagccacttggatattcggttgaacggcgcgttcaaaactggcttgacgttgatcattggttcgcgtcacaccttggctcgcacgtaaaataagttcgttgaattcactactattgactgcttgttgtccgccgagttcaagggcgatgatttgttcctgcggtgtggccaccatcgtcaccaagctagtcgctaggtcgctttccgcggcgtctgggtcaccgagtgactcaccagcgaccatcgctgctgtgacggctgcagcgacttgtttggggcctttgccttttggtaataaggttagtgcgcaataaacagcgttgaagagttctgctaataagccgccaccatcttcaagacaggttacggtgatagtgagtgcttcggttgccaataaggggcgtaatgtcgtttgcaaccattctaattggtgcgctgttatgccattgccattgacttgcaaggaaccttctgtaggttgaacagcagcgagcactttggtatcaccgcgttgccatagaacagaagcgggttgttgctttagaaaacgccaagtgacttgcactggccgtaaatcattatcagcacgattattcattcggaccatcgtttttttcctccttaatgataacttgttgggcttcaagggttgggattgctaaccattgacgcgcgattgcttcgaaattggttacagatccggtcgtataggtgtgtagttgcccagctgttgcatcggccaccaactgattgcgatcttgtaatgcctgaatcaaactatcaacagcggcatgcgcggggtcaaccagcgtgactgccggtccaactgtcttttgaatcgccgcggttaataatgggaagtgggtacagccgagaattagcgtatcaattcccgtcccgcttaatggcgcgagggtttcgtcaaccgtgttttgcacagtttcgccactcaattggtttgcttcaatcatcggtacaaaagttggcgcagccaaactcgtgacgtgtgtcgccggtttgagtgcctttagttgataggcatatgcgccactgttaatcgttccggtcgtggcaattaccccgacatgccgattacgggtcgttgccaatgccgcttggctacctggtgcaatcacaccgattacaggaatcgtcaattgcgcttgtaaatcaggtaaggcggccgccgttgcggtattacaggcgacaaccaatgctttaatattttgcccccgtagaaaattggtcatctgccacgcaaatttgcgcacggtttccgccggcttttcaccatatggtaggcgcgcttgatccccgataaagaccatgtcttcgttgggtagacgtttaagcgcctcttttaagagggttaggccccccacacctgaatccataaaaccaatgggttgtttttgcatattagatttctcttttcatttcaggatacactcgtaacttctattttctcttttttcggtgcaaaattcaactaaaacaacgggcacggccggcaattcacagttggcgttaatttttataaaaaataaagagttttcgcggtataataggagtacttataaaaaacgaaccataaaggagtgccactgtgactcaatcacgctatgaacaactcgcccaaaatccacaaactgcatcatatctgacacaggcaacattacgggatatcttgttaccatcaattcttggggccgaaaatgacgccatcagctattgggccggtaagcaactcgctttgcaattcccactcgattctttcgaagacctctgtgccttcttcgaacaaatcaacttcggccatctcagtcttaagaaacagaagaaggaacaatacttcttcgaattaacaggcccgattgtcgcttcacggattgcggatttcgatactcctgacttccaattagaagccggcttcgttgcccaaatcctcgaacaacaattgcggattgtgactgaagccaaagcaaccattgaaaataaaaaaaacgtaacgattttcgtccaaacagattcaaaagcaccaattgaagacgaagcagtcgaagccattcatttaacggttgatgcatcacaagtcgcatctgtaccaagtgaatcagaatctgttgaagaagaaccagcacctgtgatgacacaacctgttgaagcagcccctgaagaagtggctgctcccacactagaaccagaatccgttccagaaacaccagttgttcctgaaccggtggaaccagaaaacaagccaacttctgaagaaacaccacactacacaagaacccgcgtggcagacttaccaagtcgacgagaaatgcatagaaaacacagataagcatgtgctataaaaaaagggtaggaacaaaattaaattttgttcctaccctttttgaatacttagcatattaaacgtgttaatcctcaagtgataaccggctctgtctcactctaatcaaagtcatggacgttattgccgctgacgttttgccagtcgcgacttaagaagtcgtttgacatgtcatagtgcactgtttttgcttttttcgttctcatgaatggttggagtttttgatcaactttcaaccagccacgccagccaagatgaatcgtatcttgcatgaagaattgttcattaccgtcgttagtcatatcaacaatgttgttgaagccttgcgttctcaattgatattgaatcttcttatcaaaacgattcaacatcgcttgtgagagccctgtataagcggcccaacgcgcattaacgggtggaatgatgaattgaacagatactttatgggctgcgaagtaatctaacatcaattggaaatcagcaaactcaggtgaactttcatagttaaagtgactttgttcacccttcaatttaccaacattgggtttaacccgttttttgtaaaaactattttgaatgccaaacggattatcacccgttactttttgtcctaattccgttgcgacttgatcaagttgcatgttatcaggttgttttggtaacaccttcaagcctttacgcaattcgcgttcacgaccccgaatgaataattggctgaagagttgatcttgatgttgtaacgctgggcgtttcacattattaatgtatactttttgcgtctccgttaaaggtatgcctaaagctttgttcttcaatgcatcccgcattaccccgttggttgtatcacttgtgagttctagaattcgtttcgctgcataccgcgtactttcagaatccttcgcgtggattaagaaataactggtttgtagtggtgaatagaagaaatcgaacatctcaggttttaccccttgtggtacaaaccattgtggcgaaataacgacgacggcctttttaccgttcaagtgattaccagtcgcttgaagtgataaaaagtgggtcaatgactgagtccctggtgcccctagtaggaatggcttattttgccaatcatacttgtttgccataacagatggatgtaacgcgtccattcgggatagttcggatgaaccaatcatcggaatgtagttgtcgttaaatgcagcatctttgatggcttccccttttagcacattggcggataatgacgtcgccgctgtcgacaacgtcttttcgctaggtcgtcctaatcgaagaggtgatagtaataaggctgttaagcagagaccggccactaaaaccgggccgaaaatttgccataaacgtttaaacattttattgcaattcctttacgcgagcaatgatcttgttaggtgttgaccatgcttcacgatcgaattctgaaacaggtacttcaatatctaattggccttgtaattcaagtaacatttgcacagttgccattgaatctaatgtccctgattcgaataattccatatccatatcgtctttaatatcgtcgttccctgttaaatctgctaaaatttctactactgtattttctacgtccatgattaaatcgctcctttagtgtgtaggtcttagtggaaccataaccggtccaaaaagcctgagaaaattagaaaactgagacaaacggtgttaaacgttgcaaaaattgctaagtagttcgtccaccgattgctgataatgtgatccttgtgtttcttcttgaaacgcaaccagacatcggtaaggatgatccagatggcgtggaacaagccgtaaacaatgtagtaccatgtcaacccatgccagaagcccatcaataagaagagtgttaaatagccgagattggcaatgaggaccttgttcttggtaatcttatgtttcatcaagaagaacactaagcgcatgtagatgtaatctctaaaccagaatgataatgtcatatgccatctattccagaattccttgatattggttgatgcaaatggcttgttaaagttaattggcgtttcaacacccatcacataacttgttgcaacagcgaataaactgtagcccgcaaaatcgaagaataaatacatactgtaaacatacatgtaaccaacaagcccccatgagatatcaaggaacccaccgcgactcgccattgctaaatgcgcaactttagggagtaacacggtcccgaataagtaaccgagcataaacttatacacaaagcccaacatgaagttgtggactgccttgcccagtaagtcgagataatggtcacgatcaggaacttttaggtaatcttttttgaaacgacgataacggtcaattggtcctgatgaaatcgtcgggaaaaatagcataaattgtaagaataaccatggttcaaatttcttaatactgccatcacgggtttccataatcatcccaactgacttaaatgtcagataactgatccccaagaagccaagaattgaattactacccggatttaagaatggcacgaacttgacaatcactagcggcataatcgctaagataacagccagatcgaatagccaggtgttgttgtgcttttgacgatagacagtgtatccccaaatcagtgctccttcgaacaggacgtaaccaatcaaggcaatcccctggtgaaccttatccccgtcaaagattaggatcaaaaagagcagtgagacaagtgtctcataaacatgccaacgtttgccgttaagtaagccaatcactaacggaattaacgccgcacctagaatgagaaagtagttcggattcgcgtacggttgtaaattaggcattgccattaacctctttaatcaacgctttacgatcaatcttcccattgacggataatggtaatttttcttgataaacaaatcgttgcggaatcatgtagtccatcgtattttcagcgagttctgcttttaacgtcttcgttaaatcattgcccgcttcttgaccgtctgctggcacaacataggcaatcaattgggtgacttgatgggctttgttgtagcgcggtacggtacatgcttgatgaacggctgctaattggcttaagtggtggtcgatttcctctagttcaatccggtaaccgtgcatcttaacttggaagtcggtccgccctttataaaagagcaagccatcttcgttttgggtgaccaaatcgcctgaatggtagaagcgttgcccgtctttttcgaagaaggctgcagctgttttttcaggattattcaagtacccttttgaaacacttgggccactgattaagagttcaccaggttgaccaactgcgactggattattttgttcgtccactacgacagtttgagtatcagcctttgtgtagccgattgggagtcggtcgtaagtcgctaagacctccgccgtaatttcgatgctcgtcatcgcaacggtcgcttcggttggaccgtaagtgttgaagatttgtgcatcaccgaaacgttcgattaacttcgttgctgtttgatgcgttaattcttccccacagaagacgaattgttttaattctgggaaatgttcactatcaaatgttggtgataataagcagatttctgcaaaagatggtgttgaaacccattcgttcaccttaagagttggcaagacttcaaataacgtcttgaagttgtccgtcacagctttttctaaaacgacgagggttgcacctgagcataacccgggaaataaatccatgactgataaatcgaatgagtatggggcctgaattagaacgcggctgttatccgcaacgttgaaagctgggttggcccagtcaacgaaactttgtaaattgctttcgctgatttggacgcctttaggtaaccctgttgtccctgacgtgaagatgatgtagaaattctcattcccttgcacactttggctagcatcataatcggttgctccgtttgcaatcacatctgtcaattgaggttctgcgaaaacgggcatattaacatcaatcgctgtttcaccagcccatgataggacagtagccggcgttgcgactgattcaatctgtttaatccgcgctggatctgaatgttgttccaccggaatataagcatggcctgctttaacagcacctagaaaagttgctaccatctcgaagttttgaccaccgaagataatcaccggtgctttagctggcaagtcttggctttgaatgaaatgagcaatccggtctgaagcagcctttaagtcggcgtaagtgtgttgcgtcgtgcctaattgataagccacagtttgtggttggtcaattgcaatcgcatcaatttgttgaatgatattctttttcattttaacgacgctccttcattagaattcattgtagataaatttaggactaccgataccactgtaatcatataaataaagtagaattagcagaataacaaaataaattatggttttgccaatgaaattgacggccggtttattccaaaaattaagtattttttgacccattttttcaccatctctttctctctctttttgattttcatcattttgttcatcattaaagttaccacaacgtttattaaacaaccactaacatttttgtcacacgctgtcacataaaaaaagcacctactaaatagtaggtgttttcataattagtcggtatattgtgccaaaatcgtttctagttgttccttattatggaagccagtaattttttcaacaacttgaccatcttttttaaccactaacgttggaatcgccataattccgaaattagcaggcgtttctggattagcatccacatccattttactgaacttaactttgtcgttagtttctgccaatgattcgataacaggtgattgcatccgacaaggaccacaccaagttgcccagaagtctgtcaagacaacgccactctttgtttcttcttcgtaatttttatctgttaatacttcaaccattattcttcgccctccattcaattgtacaaaacatattatttatcatgatactcctatatggcgtaaataacaacttaactcgcttattattcgttacaaacggattattttatccccgtttaatttaacaagcctaaaaaaacacccccaatcaaaaccagaaaggactggttggattgggggcgtaaacgtgctccagcaggcaaactcctccggttagctacaccagccaaacgaccaacaagttggtcattcgtctgcctatgctaatcctcggcgtataaccgcctgcttccgcactctatttgaatgttacgattgttgcgccattgccgcctgcgtttgctggggcgtattcgtatttcttgacttggcgattgccttttaggtagtcctggacaccttggcggattgcaccggtccctttcccatggacgattgtcacttgttggtagttcgctaacaaggccgcatcgacatattgatcaacttcagccattgcttcttcgtagcgtttgccccgcaaatcaagttgggctttaacataccgcgctccaccgctgttgacagttgtcacatgccgttgaggtcggttatcttcaacgactttttgtttctcaaggtcttcgttagcaatcttcatcttgataatgcccatttgaacttcccagttcttggcatcgatttgccggactaatgtcccacgttgaccgtatgaagtaactaaaacatcatcgccttctttaagggtttgacgtcgttttgcccgttgcaatactttgtttttcttcaaggttgtttcttggtgcaattgccctaattccgacttcgcatcgattaattgattttccttaatctgggcgccttgattcatctgcatatcccgcaacttggtaatcactttgtctgctttaacttcagctttttcgacgatcgcattcgctttttctttcgccttcgtcatttctgtttcacggtcttcgaagaattgttgataagcagttgataactgttgatgcaagtcagtcgcttctgctaattcatgccgcaaagcttggtattccgtttcggctgccttacgttgattttcgagatcggtaatcatattatttaaatcttggctttcatcgttcatcaattgtttagcttgttgaacgattgagcttggtaaccctaagcgcgttgaaatatcgaacgcgttactacgaccaggcaccccaattaataaacggtacgttggttgtaaggtagccacatcgaattccatgctagcattaatcgtttgtggccgattgtaaccgtaaattttcaattctggataatgggttgaggcaacgacatcagcgccaacaatcccaatttgatccaagatagcgatggctaaagcggccccttcttgtggatcagtccctgcccccaattcatcgagcaagaccaaactacgatcgtcgatatgttggagaatctgaatgatgttttccatatgtgctgagaacgtactcaagttctgttcaattgattgttcatcaccaatatcagcaaaaatatccgagaagacgccgacttggctctcttcacacgcagtgataaataaaccagattgggccatcacttggactaagcccaatgttttcaacgtgatggttttcccaccggtattgggacccgtaacaacgatggcctgataatccgccccaatcgcgatgtcattagcaacgactttagctgggtcgattaatgggtgccgtgcttgtttgagttcaacatggttttctaaattaatcagcggttcagtggcctccaacgctttagcaagttgagccttagcattgacgaaatcgagttgccccaataattcagcgttggctaaaatattgtggcgttctggcatgatggcttccgataattccgccaaaatccgttcaatttcttgttgttcttcaatttgtaattggcgcaagcggttattcaattccatgatggcttgtggttccatgaaaagggtctgaccactagcactctgatcatgcacaacgccgccgaattggccacggtattcttgtttaacaggaatgacatagcggtcatttcgaatcgtgacaatcggatcactcagatatttagctttagcaccgtgtgtataacttgccatccgcgatctgatttggccttccaattgttttaaaccagtccgtaagccacgcaacttggttgaagccgtgtctaaaacggcgccatcatcagcaacagaacttctaatcttttcagttagttgcggtaaagtcaccaattgggcaactaagtctggcaacgcctttaaggttaattcatctttttctaagtcatcaaagaaacgcacaaccgcagaagtcgcacgtaaaacccgcccaacttgcgcgagttcggtaccgtttaaagtcgcaccgatttcgattcgtttcaggtgcggacgaatattatctaactgtggcaaaggaatgccaccttttagccgttcaatatcgaccccatctttggtctggtccaagcgttcttgaatcaattccgcatcgttagcgggggttaattgtgtgatttgttcttgaccaaacgccgtgatggcatggccttgaagcatttgtttaattttatcgtattctagtgtttgtaatattttatgattcatttaagttagctccttctaaaaaaggggcgacttccgtcagccccaactgcactatccattttagccagcaatccaccagctcgtcacttgagaggtgaggactggtgtgtgtaagacaatgacgcgcgcaactgtcgagttttccaatgtcttctgtaagccatcgactggcactaaagccagcacgtagaggagcaaaaagagccccacgtaaacgaccaagaaactcaaaagtccaccggctgccttgttaaattgcttcaaacctggcatataagtcaatgaattcaacaatagtccgatgaagcgcaccaacaagccaccgataaacatcacgaggacaaaggcgacgccgatataaaacgcatcatcgagtgacaacccgatactcttttggaaaaatgcaaaatagctgtcttcagttgccgatgggtatggcaccattaaacttagcttaggccctagtgtttggctcatcgctttggcaatccaaaagacgataaagtagccaatcgtgtagacggcttgcatgataaacccccgtctgacccctgtgtaaatggcatataacagcattaagataataattagacttaacatgagttccccttagatacgcgttttgtggcgtggatgtgtgtatgattgattggataaagtattctgaaacgtgctccataagccatcttcttccggttagctacgcctcgcaaacaatcgacttcgtcgcttattcacgagtctatgctaatcctcagaagatacccagcttattgcgcactctgatttttgaaacgtgctcttgcaggcatatttctgcgcttaaccaaatttgccaaatcggcgattgcatcgccaattcgtcaaatccagttaatactcaaaatataaccgcctgctgtcgcactctttttttaacgtactcctgcagatatactcttccggttagtttcataccgcaaacgatcggccttgccggtcattcacggtatgctactaatcctcagagtatgaccatctgcagtcgcactctaattttatttgctagttcaactgaactattttatcatgaaataagggaaagtggcaattttactccgaatctcttcatttgccactcattaaggagccaatcgtatgcaagcagtcattaaagtgacaccctcacaattaactactattcaaaaaaattatccgaccaaccgtcaactaccgccgggggccgtttttgcgcaccaagccaatggactaagcattaccggctataaatctggcaaagtacttttccaaggcgctagtgccgaacgagaagctgctaagtggggcaccgctacccctagcaaagcaaaatctgctagccgtactaagcctaaagccgccaaaggcgatgttttaccagctgattttgccaaatggtccgttttaggctcagatgaagttggtaacggaagctacttcggtccgctgaccatcgccgccgtctatgtcagccaagaaaatctggcgttcgtcaatagcctaggcgtcgcggattccaaaacgctaaccgatgcacaaatcgatcagatggcaatcaagatgatggctaaactcccctatcacatcgtcaacatcatgccaccgaaatacaatgaagtacacgccacaatgaacatcgaaaaaatgaaggccatcagccataatttcgcactcctcaaagtcctccaaaaaatccaacccgaaaaacccgctggcatcctcattgatcaattcgaaccacgcggcatttactacaactatttgaagaatgaaccggttgttttacgcgagaacgtttatttctcaaccaaggcggaacaatttcacctcgccgttgctgccgcttcaatcattgcgcgccaccaagccaacctatcaatgcttgaactgtctaaaaaagcgggccgccaaattccgctcggcaatcatcaagcagttaaccaaatcgccgcagatttactcgcacaaggtggcatcgattacctaggcgaattcgctaaattgcattttattaacacggaaaaagcgaagaaattgttatagagtgcgactacaggcggtgatattttgagcattaactggatttgacgaattggcgatgtaatcgctgatttggcaaatttagttaagcgcagaaatatgcctgtaagagcacgtttaaagtgcgtttaaagcgggttgactctgagcattagcacagtgttgtgaatgaccgacaaagtcggtcgtttgcaatacgaagctaagcacaagagtcagctttaaaaagcacgtttcaacccacaccttctccacataaaaaaagggtcccgactgcaatttaattaattgctatcgggaccctttttgaaatagatagtgataacgtgctttcatcaacaacttcctgtgctttgctacacttatcaaatcggcgattgcatcgccaattcgctaagttaggcaaatgctcagaagttccccgttgatgacgctcttcttttctttaacgtacttttcaaaccatacttctgcggctagctacgtcccgcaaacgatcgacttcgtcgctcattcacgggactatgctagtcctcaaagtataaccggtttgaacgcacttatttcatgttgtcgtctgccaaaaatgtgtttagtacttcttcaaccatttcccattcttcgtcgtcttcgattgggaataggtcacctttgctggcatcgcctgcatcgtctgatgtgaatgagaaagcttggatatcaacttcttcatcttcttcagcgcttgttgggtacaatagcacgtatgatttaccgtaatcttctgaatcaaatgtaaagagcacttggtataattcctcgttaccttggtcgtcgattagtgtaatttgttgttcttcatcttggtggatgttcttgttatcttcagtcattcatcaaaactccttaattgttttatttattagccttgtgttaagcgaccgtgcgcgtccaagtagttctgcaaaatcatcaccgcagcaagcttatcaatcacttgcttccgtttcttacgtgacgtatctgcttgttccactaacatgcgttcagcctgaaccgttgttaggcgttcatcgatgtaatcaaccggaatctctgggaaaagttcactcagcattgccccgtattcttgcgctttaagcgcccgtggcccaatcgaattattcatattcttgggtaaccccaaaacaaaaccagtcacttgatgttctgcaaccaattccttgacgcggtctaacccaaattctgattcatcttcattgatgcgaataatctcgaccccttgagctgtccagcccaatagatcactaatcgcaatgccaaccgttcttgatcctacatcaaatcccattaagcgcattatttcgtcgtttccttatccaaataatttttaactaattcctcgataatctcatcacgttcgtgcttgcgaattaaattacgagcatcattatagcgcggaatgtatgctggatcaccggacaacagataacctacaatctgattaattgggttgtagcccttctcttctaatgtctgatagaccgtcgttaatgtttcatgaacattcttggggctatttttaccaaaatcaaaatggactgttttatctagattcatctctcaacacctcaacttttcgctacttatacaaccatattctactcgaaaacaggacaaagtacaactctcccctctcttagcagaatgcggatgagagataactataacacatttcgctaaattgattaacaaaaagaacaaaaaaataacgggattgcaatcaataaaaaattgacgacaatcccgttataagttaagcgttcgctaaagctgttttagcagctgccaaagcatctgcgatcccagctggattcttcccaccagcttgggccatgtctggacggccaccaccgccaccaccaacgagtggtgcgatttgtttaatcaaatcaccggctttaatccccgctttaatcgcatcaggtgcgaccgcgacaatcaagctaaccttatctcccgcaactgttgcgagcactaagacatctgaaatttgtttttgttgccattgatccgctaattgtcgtaattcgttcattccggcaacttttgcatcagcagccactaagcgccattgaccaactgtttcgacattttcaaaaacattgccagcttgttgttgggcaaattttgctttgagttgttcgttttctttttgttctgcttttaagtcagattgtaattgttgaatcttcttaggtaaatccttggtttgagcaactttcaattcaccagctaattcatttaataaggcttgtttgtcattcaaatacttgaaggctgcctttgaagtcacggcttcaatccggcgcgtcccggcaccaatcccagattcgctcgtaatcttgaatagaccaagatcagcagtgttagcagcatgcgtcccaccacaaagttccattgagtaatcaccgatttgaaccactcggactgtcttaccatatttttcggtaaagagtgcgatggcccccatttgtttagctgtttcaatatcggtttcaacagtattcacaggtagtgcagcccaaattttttcgttcacaattttttccacagtggctaattgatctggtgtgacttgaccgaggttcgtaaaatcaaaccgtaagtagtcaggttcaaccaatgaaccagcttgatgcgtatgttcgcctaaaacatcacgcaaggcttgatccaataaatgcgttgcggtgtgattcttaatgacgccaccgcggaaggttggatcaactgataagacatagtggacaccactaatcatttcttcgagcacttcaacggtgtgtaatggttgcccgtttggtgcgtattgcacgtcagtcactttagcgactacttgcccagctaggttcttaatgatcccttgatcagcaacttggccccccatttcagcatagaatggtgtttggtcgaagattaattgcgccgtaccactcttaatcgtttgttgttcggcattatcttgtaagatgacgcttaacttactttctgtttcaagcgttgtataaccagtgaaggtactttccactttgatatccattaaaagttcgttttgcatccccattgattgttcatcactacgggcattacgtgcacgtgatttttgttgtgccatttcactttcgaaaccagcttgatcaaccgttaagccttcatcttcggcatattcagttgtcaattcgattgggaaaccatacgtatcaaataacttgaaagcatctgccccagcaatttcactttgaccagcagctttgacactgtcaatcgtttggttcaataaacgtaaaccatcattcaaggtttcacggaaacgatcttcttcagaacggatgactttttcgatgaattctttttgtgctaatacgtctgggtaatagctttgcatgatttcaccaacgattggtactaacttgtacatgaaagcgtcgttgatgccgagtttcttaccatttaagatggcccgacgaattaaacggcggagtacatagccgcgaccttcattggccggcattgcaccgtcaccaattgcaaacgtcacagcccgcgcatgatctgcgataatcttgaatgaaatatcatcagctgcattttgaccgtattgtttgtggtcactcatcttagctgtcgcttcgatcaatggcatgaataaatctgtttcaaagttggttggggcttcttgaatcactgaaacaagtcgttcgaggcccatccccgtatcaatgttcttgtggggttgttcaacatattcgccgtttggtaaatggttgaattctgagaacacgatgttccaaacttccagataacgttcgttttcgccaccaggatagttttcaggatcatcttcgctaacgttgttgaagctttgaccacgatcatagaaaatttctgaatcggggccacaggggccttcaccgatatcccagaaattatcttcaacttcaatgatgtgtgattctggcaaaccgactttttcatgccaaatccggtgcgcatcttgatctttaggataaaccgtcacgtataatttttcaggatcgaaaccaatccacttgtcgctggttaagaattcccaagcccatggaatcgcatcttctttgaaatagtccccgacagaaaagttgccgagcatttcgaagaaagtatggtgacgagcagtcttcccaacattttcaatatcgttggtccgaatactcttttgtgcattggtaatccgtggattattaggtacaacgcgaccatcgaaatacttctttagggtcgcaacccctgagttaatccataataatgtcggatcatcatctgggacaagcgatgcacttggttcgacatcatgacccttttctttaaagaaatctaagaacatttggcgcacttgcgcactggttagttttttcatcatgtttgctccttcaaaaaaataaaacaccgctgcaatttcaaggacgcaaaagcgcggtaccaccttgattgcaacgatgttagtcgttaacctctttatgagtttattgaattgtttgtgatgttggggagcacgtcaaccaatggcggcaccttctctcagtctagaaaggcgttcctgtctccgtcagttcgttgcgtatatcccaacacttccaaagtataaaaaagatttgctgaattgtcaactaatccaaggtaacggtaatcgcaggccgatagtagcactgaagcgtcggattgcccaatgccgccgtttgaatcccagattcataggcgggtgcttcaggcaaccattgttccaaactataccgtccccctgtcacacaagcaccacccttataaacaagtggatcttgagtaagttcataaccgtcagcggctgttgcttgtaacccaaatggcatctgctggcgctgagtcggtcgtggtaagtgattaccacttaaccacaacgtcttactccctgcacctttaagccattcatactgatcaacactcaccagatcaaaaccgcgccgccgcaatgtctggcgtagttcactttcgtcaccattagttttttcaaacacttggtaacaatctggtcgcccacccgcttgtaaaattaggtgcgcactttcaagtgtttcagctgaattttgttcccgccgcgcccgaaacaaggtattttggatttccgccaaaaactgacgcccaactagttggtttccattaaaacgtcctgttgtcgtttcatactcgccttggagtacccactcacttgaaattggtgtttgtgccactaacatcggtgccatattaacaatccgatattctgatgtcatctgatcaacgtattgatcgacatccgcttgcgtcgcccaaacgagtccttgatcaactggtaacgtacgtttagtttgtgcaaaccactcactcggtgctaagtgggctgcccctgcttgccatcccaactgcacattagcttggccggggataaaaataaactgctgcccagctagccgggcactgtaagtttgaaatacttgagtgccaatcgttgcggtctcactctgaatcgcttcaattggaatcagcgggctaacaaagtagcgcaacacctggccaaaattagcgcgccgtgcttcttcggataacgataaccagttcagtaattgtaagtcattttcatgcatcacagccacctcgattatgaattaactagctattttgcttcttgttttgacgtttcttttcacgtaattcaagtcgttgttcaatccggcgtttcttttgtgcatcttgtttaatggctgctttaatctttttcttataaccgggtttgcgtttaagtttggcctttttgaccatccctttcatgccgacatctaattcatgcgtggtagctacccgttttttacgacggttccgatcatatgatgtgaccaattcgccatctttaaatgtctttggtgtgaacttgatgcccattgcttcaatttgtgcaacggcttgttcatcatctggaccataaagcgtaatcgcggttcctttaagaccattccgaccagtccgaccaacccggtgaatgaagaattctaaatcttcacgtgggacttcagcattaatgaccatgctaatcccttcgatatcaataccgcgggccgctaaatcagttgccacaacatattgatagtctaagttatgaatttctttcataatccgtttacgttggcgtggtggaatatcgccatgaattttagcgactttcaagccttgtgattgtaaataacggtggatgtcatcaaccttgctcttcgtattagcgaaaaccaagaccatgaaaggatggcccatcgtcaataatgaataaatggtttggttgagggctttccccttcgttggcactaaccagttgtcgattgttgggctaatcacagtttcgtttttaacttcttcaatcacaggattgtgcatgtatttttgtaagaagggttgtaacttatcaggaatggttgctgagaagaccatcatttgtaagtcttctggcaaacgactagcgatgtcatcaactggcttcaaaaagcccatgtcaagtgtcatatccgcttcatcgatgaccaagatcttcgctgtataaatcttaagcgccttgctcttgattaaatctaaaattcgaccaggagtcccaatcacaatctgtggttgatgttgttcgagtttttcgatttggcgttgcttgtcagtcccaccaacataacgaccaatccgaatatcccccgtcatgtgttgagtgattaattcggcagccgtatagatttggtaagccaattcgcgacttggggctgtgatgacgatttgaacttcgtctttttcaggcaccagtttatttaaaaggggtaataagaacgcgtgggttttcccactccccgtttgtgattgaccgataacacttttaccagcgttgatggctggaatcacacgccgttgaaccgccgtgggttttgtaaagtgcatgtcgtctaaagccgcaatgatttcgggttttagattaaattgtgtaaattgattatccataaagtcctgctttctattgtttgaatccggtaaatctggatctgcgtctattcagtgtactgcgcggctagcgctgataattctgcaataattatgtcgatttcagcttgatcagctgccttagcgccactagcgagtggatgaccaccgccatcatgttgcttcgctagttcattaatgattgggccctttgagcggaaatgcacgcggtaagtgtcatctgcttgttgcacgaagatgacccacgttaatacccctttcaaacgaccgggtgttccaacaatcgagtgtacttgttgcggttcaacatgtaaccggtcctgggttgcgcgatcaaccactaagtaggcgacttgttggtcgttcacttgaagttgatcgaataagtacccttgtaatttggcttgttccaacgtgatttcgttcatcttttgattgagcttatcatggtgaatatcaaacgtcatcatttgggcggcacattccatggtatgtggactggttgaattaaacatgaagcgccccgtatcaccaacaatcccggcatataaaacacgcgcagctgcttgattgaattgtaagtggccttcgctgttattgacgatgtcaataatgatttctgaggtacttgaggcatcaggtaacacccagtttaaatccccataaggatcatcgttgggatgatgatcaattttgattaattcagcgcctaagttaaacgtctcaccactaatccgaggtgagttggctgtatcagtcacaatcactaatgcaccttgataagcagccggttcaatttcttgaacgtttgcgagccatgccaagttaccggtgtcgctcccgacttggtaaatcgtcttgtctgggtagctgttacgcagtacttcagctaagccaacttgtgagccaatcgcatcaggatcaggattgatatgacgatggatgataatcgtatcgtaagtttcaattttagcaataatttgttctggagttgtcatttattaacctctttctaagagttgaccagtgacgagggccttagccacaatcacatgattggcgtaaacatcgacatcgattttagctgaacgccgtccaatttcgagcaagcgtggtaaaatctgaatctgcgtgtcgatttgaatcaaccgtaaataatggaggttgatctgttcaatcattgaatagcgctgatgttgcgtctggagcatttgttgacaagctgccgaaaccgcttcggtcagtacaccaaatgaaattgtccctaagttattcgtcatctggggcgtcacttcatattcatatgccgccgtataaaagtctgggacagtttcactaggacgcagtggttcgacaatctgatcataaaacgtctcggcgacttgcggttggcgttgcgccgtttgcatgttgctcatgacatcttgccgggtaattaacccttctagttctaaattgtccgccaccactggcatcacttctaaactattccaagtcattgaatggccgacactggcaacactcatgtattttttaacgctcgcgggttccttggtcatgactttatccaaggtcatcgtggccggtttatctaaaatatccttcaccgtcacaatcccaacgaggcgcatatgttcgttgacgactggaaaacgcgattgttttaccgccgcactcaattgcttgtagtcggctaccgtttgattagcatgtaacgtgtggatttcagcaagtgggtggtagatatcagccaccgttatgatttcttttttaatcaattgatcggtcaacgcccgattaatcaatgccgccaccgaataggtatcgtaggcagtttgcaaaatcggtaaagccaagtcgttggccaatgcaatgacgtccgccgaagtgccaaaaccgccggtaatcaaaacagcggccccgttttcaagtgctaagcgttgcacatccgtccgatcaccaacaatcatcaatgactttggcgtaatgtagcgcgtgatggcatcgatttgcatcgcgccaatcacaaatttgtccaacaacttgtctaaaccagcgcggccaccaaggacctcgccgtcaatcacttgaacgatttcttcaaaggtcagattttcaatcttcccctttaacttctgttcaatgcggatggtaccgacccgttcaattgtgctgaccaggccgttattttctgccgctttaattgcgcgataagccgttccttcacttaccgagagtgttttggcaattgagcgcaccgaaatcttgtcaccaattggtaaattttcgatgtacattaaaatttgatcatgcttagttgccactcaacgccaccaccctttatcagatttacatagttattaatagtatatcggttttagcgcacaaaaacaaaggaaactcaactattcacgctcccaatcgtataacggtaacgtgatgttttcaaatgtttgcggtgccaagttagtcaccgtaatcccgagcaagcgcacgccatcttctgcatggccgatggtttgccaaatttcccaagcgatcgcctcgagttcagctgccttgccgacatattcgttaaatgttttacgcttagtaatagtttcaaattggcgattccgcacttttaaaacaactgtcaaaccgtgtttttgattcttgcgtaaacgccgttcaagttcaatcgctaacttcttcaactcaacttgcacctgctcttcactgattaggggttgcccgtaagtattctcattgccaattgatttgcgttcacgttggtaggcgaccgggcgattatcgatgccgcgcacgtgccgatataagccgtagccaagcttgccgaaattttgcatcagcatcatttctgattgttcaagcaagtccgcccccgttaaaatcccgagttcttgcattcgcggcgccgttttcttaccgaccccacggaatttttcaattggcaagcgacttaaaaaggcaatcgcttgttccggcaaaacgagtgtccgccccgctggcttgcggtaatccgatgccatctttgctaaaaatttattgtacgaaatccccgccgagctgacgagttgggtttctttaaggatttctttttgaatgtaggcgaccacatcaattgtgtgtgccaagccgagtttattttccgtgacatcaaggtacgcttcatcaaaagcaatcggttcaatcttatcggttaccgtatgaaaaatcgtgtgaatctgttccgagaccgattgataaagcggaaaattgggcgccttaaaaacggcttggtgattcggaatcagttcagctgctttttgcgcactcatcgccgagtgcacaccgtattgtcgggcaacatagttcgcggtcgtcacgacccctttgccaccagtatcactcggattacgggcaatcacgagggacttttggcgtaagtcgggctgttcacgctcttcaatcgatgcgtaaaacgcgtccatatcaatgtgaatgattttgcgactcgtatcattttctaatggaatcttgaacagctctgccatgttacccctccttaattttttcaacatgctttttcaggcacattgttccgcttttgacgcacttctttctttaacgtgcttttaattcgtaaccttctgtgctttgctacatcagccaaataatcgcccttggcgcttatccgtctgattaggcaaatgctcaaaggctaaccgcgaattaacgcacttcttcctttaacgtgcttttatcaacaacttcttccgctttacctcacttgccaaatcggcgattccgtcgccaattcgtcaagtactgtaaatgctcagaagttacccgttgatgacgtacttctttcaataagaaaagcctggcatgagcatctcatacacagactttgctgacttgtttaatttaattattttgagtgggatcaaaaatccattcggcccctgttgttgccagtaaatctgttgcttctttaggccccattgaaccgattgagtaacctggtagtggcgtttgatccgcatcccagacttcacgaatcgcatcgacaaattgccatgaagcggctaattcatgccaatgtgtgaagttcgtgccatccccattgagcgcttctaaaatcaaacgttcataagcttctggactgtcagccaacatctgttcatcatattggtaagccaattgatcaggtttcaaggcgaatccttgaccgacttctttaccattaatcgttaatgaaaagccttgttccggttcgacatagattgttaagacatcaggtgccattgctgaacgatctgacttatcatcagcaaaaatattgacgccagtcttcttgaagacgatattgatttgcgtttctttacgtgccaatcgtttaccggtccggacgtaaaatggtacgccacaccaccgttcgttatcaatcatcactttcccagcgacaaatgtttcggtttgtgaatcaggcgcaacgttggtttcttgttgataccccggtttgttttcgccatccaccgatgtttcagcatattgggcgcgcacaaagttttgtttgatttctgctggtgagtaaggttgaatacttctgaaaagacgtgttttttcacgttgcacatcttctgccgtaaagttaaccggcacttccattgcaagcattccgatcacttgcatgatatggttttggaacatatcgcgcaaggcccccgatgtttcgtaatagccagcgcgttcttcaacccctactgattcagccaacgtaatttggacgttatcaatgaattgattattccatacaccactcaatagaccgttcccaaaacgcaaagcaacgatattttgaatcatctctttaccaaggtagtgatcaatccggtagatttggtcttcatcaaaggtttgcgtcaattcttggttaagcgccttagcactttcataatcgcgaccaaatggtttttcgataatcaaccggttaaagccatccgccgttaggagcgcttctgatccgagatgacttgcgattgtcccgaagaaccgtggtgacatggccatgtaataaatccgattttggtgtaattcgtattgttcatccaactgacttgctaaagcctttaatgtttcgtagtgcttggcgtccgtcacatcatgtgattgataatagaaatgacctacgaaagcttctttagttgcttgatcttcatcaaagttgtccaaagctgtcatgacgatttcgtgataatgatcatccgtccatggccgccgtgctgttccaatgacagcgaagtgttcttttaaataacccttccggtataaattaaataatgcggggtataatttccgttgggctaagtccccggaaccaccaaaaataataaagagtgctgctaaatctgtgtgcatatctcacaccactttcatataaattaattttgtggcgtcacaaagatgtgttgtgccgctttgaggccgatttggatttctgtttgactcgtattattaaaaacagtcaacggactttcgaagaggccaaccttttggagcgtcacactgtcaccgactgacaagccgatttccagtgtatattttaataagtcattatcatccaatacgcgatcgataatcgccgtttcacccacttgtaatgtttcaagtgcgatgtgactttgttgttcgaattcccccttggcattgggtataatcccaccatgcgggcaacgcgttggatgccccaagaaatcagctaaccgttcagccaagtcgtgattagtaacatgttcgagttgttctgcttctgggtgcaccgtattgaattgataatgtaacttgtcgactaaaaaaacttcccataaccgatgattgcgcactaatagggctgcttcgcgggcgccttcacttgttagttgaattccttggtaaggtgtgtggttgacgtagttttccttcactaacttattgaccatttccgtgactgatgccgccgaaacgttcaatcccgctagtatttccttattggtaactttctttgcgtcgccaccaagttcaaaaataatttttaaatagtcttctttattgggtgtcattgccatccagatccttaatcaagtttgtcgacaaacttttcttagttatccctgaactaaatgaatgtctactttctattatgccttatttgtaataattttcataccattaagcttcaatttagtcccttaaatagtaaaaaattaatctcttttcagcaacaaaaaaaggcggtagaccgatttgtttcagtctaccgccttaaatttgtggtcgggcttctcaaaccacttattctagcaaatcacttggtcaatttgctagaattctgcttcgagaatccctttcaattctttaattaatggttcttttggattggttaccgtacagttatcttcatatgccagttctgctaaatcatcaacgtggcgatcaaagtcggcctttgtcacgccattatcacgtaaacgcatcttgatgccgatactttccgccaatgcagtcacagcatctgcgtaagcggccaccagttcttcagtcgttttacctggtaaaccgagataacgtgcaatttcagcataatcttcatctgctctgaagtaactgtatttagcccagagtgcccgtttcgttggtgtcttagcattatagcgaatgacatgcggcattgtaatggcaatcatcaatccgtgcggcaaattgaacgcgccgcccagtttgtgcgccagtgaatggttgatacctaatagcgcattggcaaacgccattcccgccattgttgacgcatcatgcatattggctttagctgtcttatcgcccgcataactcgcttgtaagttatcaaacactaatttaatggcttgcaaactgagcccttttgtataatttgacgccatcgctgatacgtaactttcagtcgcgtggcataaaacgtccatcccagtatgcgcaaccacgcggggtggcacactttcgatgaattgactatccacaattgccacatctggtgttaacgcataatctgccaatggatatttgatgtgcgtttcactatcagtaatgaccgcaaacggcgttacttcagaacccgttccagaagtggttgggatacagattagtttcgtccgatcgaggtttgggaacttgtaagtccgtttccgaatatctaagaatttttgcttagcgccaaagaagtcggcatcttctgaatcatagaataaccacatccctttggccgcatccatgactgagcccccaccaatagcaacaattgtatcgggtttgaagcgtttcatcacttcggcgcctttataaatggtatcggttgatggatctggctcgacatcggcaaatacttggacctgcacttgatctgtgcggcgcgccaagacgtcttcaacaatttgcacgtaacctaagtcgaccatcccttgatcagcgacgataaaaaccttatgcaagtccgccattttttctaaatagttgactgaatttttttcaaaatagattttgctgggcaacttcacccattgcatgttattccggcgcttggttagcgtcttcacgttcaacaaatcgatcgttgaaacgttgtgggagattgagttatggccgtatgacccacagcctaaggttaatgatggtaacatgtcattgtataaatcaccaatcccaccttgtgctgatggtgtattcactaagacccggcatgctttcatccgttttgcaaattcgagtggtaaagcttcatccgttgtatgcaacgaagccgtatgcccaagaccaccaagatctagcattgcttcacagagttgcaagccatcttcgcgatctttagctttaatcatcgcaagtacgggtgataatttttcatgtgagagtggatattggtgtccaacacctttaatttcagcaattaaaactggcgtatcttctggaatatcgatcccagctagtttggcaattttagcagcagattggcctggaattgaaggtcggaccgcattcttatctgggtcgattactgcgtcattgagtgctgataattcgcttggtttagcgaagtaaaccccttgtgcttggaattccttcttcactgccgtataaatttcagcatcaacaattacggcttgttcagaagcacaaatcatcccgttatcaaatgatttcgagaggattaaatcattgacggcttgtttgatgttcgccgaagcttcgatatacgctggcgcattcccagccccaacccccagtgcgggtttaccagttgaataagcggctttcaccatcccaggaccaccagttgctaaaacagttgcgaccccttcatggttcattaaagcctgggtagctgcaatacttggttcttcgatatataagagtgcatctgctggcataccggctttaaccgctgcagctttaatgacattcaatgcttcagccgaacaacgttgcgcactaggatggaaagcaaagatgattggattccgcgttttaatcgcgatctcagctttaaaaatcgtcgtcgaggttggattcgtgactggtgttacaccagcaatgacaccaacgggttctgcaatcttagtgatgccatgttctggatcttcttcaatcacaccaactgttttattgtctttaatcgcattccaaatttcctcggttgcaaaaatattcttgatggctttatcttcataaatcccacggccagtttcttcaaccgccatcttagcgagtgtcatatgttggtctaacccagcaatcgccatttgatggacaatattatcaatcttggcttgatcgaatgtttccaaaattgctaatgcccgttgtgcacgcgtcactaaatcggtgaccatttcattcactgtgttttcaaccgtttcaactgctgctttcttaaccatatcgattccctccatgccaattaactattgtgatttatttaacaaagttagtttagcgcattttgagttgtttgtaaactgttttgtgattataattacaaattttatttcttagttaaaggcgatttatcttttaaaagcctacatttgataataaatttactatataatgcaaataaaaaagcgctcggttgaagtattcaatcgagcgctctctgaattattttgtatcttcttttgtttcttcaaccgtttcttcttcaaccactgttgcggcttctgaagcagttggtgttactgtccggattgcgctcaagttaaacttgaggtaaacgccgtcacaatctaagacaacgattttagtatctgtattaacagaatcaatcacaccgtgtaaaccaccgattgtgatgactgcgtcgccttttttcatttggttcaccatttcttggtgtttttgttgttgtttcttttgtgggcgcattaccatgaaatacatcattgccatcattaaaattaagataacgaagaaactgggattaaaaccgccggcacctaacacaaagtttgccatttaaaaaacctcttttcaattttgtctattactaactctatcagacttatcaagcaacttccagtgattcactagaaattccgagtgttcttttcattgtaaccatattcttcgaagaacgcttctctgaattccaataaattatcttgttcgatggcatcttgcacttgatgcatcaaattaatcaagaagtataagttatggtaactcgttaaatgaatcccaaacgtttcgtccgctttaatcaagtggcgaatgtaagcgcgggtgtagttcttgcagacataacaatcacacttaggatccagtgggcggaagtcttctgagtacttcgcattcttaaccactaatcggccttgtgaggtcattgttgtcccattacgggcaatccgggttggcaacacgcaatcgaacatatcgacaccgcgaatcacaccatcgattaaggcatcaggcgaaccgacgcccatcaagtaccgtggtttgtcttcaggcaacattggtgttgtgaaatcaagcacgcgattcatttcgccttttgattcaccaactgataagccaccgattgaataaccggggaagtccatcccaactaaatcgcgcgcactttggcggcgtaagtcttcaaagccggccccttggacaatcccaaatagaccttgtgttgctgggttttgatgcgcaatcaagccccgttcagcccaacgtgatgtccgttcaactgattttttaacgtagtcataactttcaaagaatggtggacattcatcgaaactcatcatgatatcggcacccaaagcattttcgacttggattgctttttcaggagataagaacagtttttcgccgctcaaatgactcttgaaggcaacaccgtcttcactgatatcccgtaatttcgcaagtgagaacacttggaaaccaccagaatcggttaacacaccgcgatcccagttcatgaacttatgaagaccaccggctttttcaacgatgtcttccccaggtcgtaaccagagatgataggtgttcgataaaataatgccggcacccatttcttttaattcttcaggcgccattgtcttaacactggcttgggtcccaactggcataaacatgggtgttttaaacgtgccatgtggtgtcacaatttcaccaaggcgcgccctggtatgtttttctttcttgattaaacgatacttgatcgctggttccatttaatcgactccaattctaggattattgttggttcagtaataattggtacgcatagcgtttcggtgacggaccgtttgcaatgaagatgtcaccacgatattgaaagcctactttttgaatcatatgttgcatcgccaagttatcagggtgcgtatcgatgcgtaaatcatgtgcgcctcgtaaactggcagcggtcaccaataaggttaaaaactgtgtaccgagatgttggccgtggaaggcactatcgagtgcgacacggtgaattgaaaaataaggtgtcgaaccagattgccattgaccattggtaattgctgcatagccaggatcttcagttgctagaattgaggcgaccccaatcacctgttggtcagccatcagaatgtaacataattcttggcgaatctcgtcttcaaactgagtttgattaggttcacctgcttgccattgatttatttggcgatcctttaaggcggcctttgcatgttcgataatctctaaaatccgcggtaaatctgtaaacgttgcttttctcaaatacatcaatgctgccacctcatttttgtcgaattatttaacaaacatggcatcgccgaagctaaagaaacgataccgttcatcaacagcgtgttgataagcatttaagatgttttcgcgaccggtaaatgaagcgaccaacatcactaaggttgattttggtaaatggaagttcgtgatgaatgcatcaacagctttccattgataaccaggtttgataaagattgatgtccagccactatcagctttgagttcaccatcaaacttcgtcgcaattgtttctagcgtccgaatgctggttgtccccgttgccacgatgcggccaccgttttgtttaacttcattcaacgttgcagcagcttcttctgttaaacggtagaattcgctgtgcattttgtgatcttccacgttgtcttctgaaacaggccggaaagttcccaacccaacatgcaacgttaagtacacgagtttgatgcctttatcttgcaccttttgcaagagttcttctgtccagtggaagccagcagttggtgcggcagctgaacctggttctttagcataaacggtttgatacatttctggatcgtctaatttttctttgatgtatggtggtagaggcatttcgcctaaggcttctagaatttgcatgaagatgccatcatacttaaattcgatcatgcggccaccgtgttcgagttccttggtcacaactgcttttaattgaccatcaccaaaaacgacttcggtgccgactttggcccggcgtgctggcttcatcaaaacttcccattcatcgtcatgcgtgttgtttaaaagcaagacttcttcgtggccacccgtatccggtttgacaccgtataaacgtgctggcaagacccgcgtattgttcatgacaactgcatcgccgggatttaattcatcgataatgtcgtagaaaactttatcttctagtgcgcctgttttgtgatccatcaccaataaacgagacgctgcccgttcaatcatcggtgtttgagcaattaattcttctggtaaattataatcaaaatcttctgttgaaaccattgtgtaacctctttctaattttctgaatagggaatgccgagatgttcataaccagcgggcgtcacaacacgtccccgcggtgtccgttttaagaacccaatctgtaacaaatacggttcgtaaacggcttcgattgtttcattttcttcaccaatattagccgcaatcgtctttagaccgactggaccgccatgataatagtcaatcatcatctggagaatcttgcggtcaatactatctaagccacgtacatcgacttgtagttgactaagcgcatggtcggcaatcgcttgatcaattgccgcttggtccgccacttgagcgtaatcgcgaatccgttttaataagcggttcgcaatccgcggcgtcccccgcgaacgacgggcaatctcatgcgcgccttcttggacaatggccatgttaaagacatctgccgagcgttcaacgatatcgaccaaatcatcttcatcatagtatgccatatgttcgacgattccgaaacgatcacgtaacggtgccgacaataaaccggcccgagtcgttgcgccaatcaaggtaaacggtggcaatggaaaatgcaccgggtgcgcagttggcccttgtccgaccacgatatcgatgtagaaatcttccatcgccgaataaagtagttcttcgaccactttcggcaagcgatgaatttcatcgataaatagtacatcaccaggttgtaactcgttcaacaatgcgactaaatcgccaggccgttcaattgctggcccactcgtcgtccgaatctgaacatgcagttcattggcaatcaccatcgccaaggtcgtcttacctaaaccaggcgggccatataatagcacatggtccaacgactcttcccgctttttagcggcttcaatataaaccgccaactcatttttgacccggtcttgaccgatatattgcgcgaggacttgtggccgtaacgtcttttcaatacttgtttctgcgaaatcttcgttttctgcggaaacaattcgttcttctgccatccattagtcctcctttatttcttcattaataagcgtaaaccttcacgtaagtactgatccgtagtttgtgcattgaaatcagccagtgttttggtaatcgctttgacttcgcgggctgaatacccaagcgcggttaacgccgctaacgcatcgtttaattctggtgattcaccaggcgtaccaagatcgatagccgtttgaccagcgagcgtttcggtttgttccaaatcaccgagcttgccctttaaatctaagacaatttgttgggcagtcttcttgccaaccccagggaacttggtcaaatagctcacatcatcattcataatcgcttggattaacccagaatgatcgctattggctaagatggccaaggcactcttaggaccaattccagaaacactgattaatttttggaaaatttgcttttcatctagatcgtaaaaaccaaataacgtgatatccgtatcacgaaccgcttgatagacataaatctgaacgatatcggtcgttgattcggtgtaacgatacggattagcaacttgcaattgatagccgacgccttgaacttctaagacgacatagtacggactaaccgccgtcaccaaaccttttaaatattcatacataaatttacctactttacgagaacgtatatttgcttgttaaattgtaacataaaatccgaatcgtgaaacagccagcagccaaaaagcgtaaaagaagggcctaagtgacccccggccaactcaaaccctagcaattagtattcacgaatcttcggcggttggtaatccttgataaaggatgccatcacactgaacgaatcggtaaataagtatttttcaaaatcgacctgtgttaaaaaaccttcactgaccatgtgggctaaaaattgttgtaacaaatcataatagcctgcgacattataaaaaatgcagggaccattttgttgcccaattcgcgcccatgaaataacttcactcatttcttccagcgtaccgggaccacccggcaatgcgataaacacatctgccagttcaatcatcttggctttacgcgctgacatcgtatcaaccttaatcatttcggttaaacctggatggacgagttcttgctgactcataaaccctggcatgacgccggtcacttgtccatcatgggctaacaccgtgtcggccacggtgcccattaaaccaacttgggcgccgccataaatcaagcgcgcattgcgcccagcaatccaagtgcctaacgccttagccgcttccgtgtagattattttattaccactactagcgccgcaataaacggcaatgttttgcgttgccattagtcagcctccttagcggttaacaaccgagccaccgtactgatgggcaagccaacaacattgtaaaagtcaccgttgattttctcaacgagcagacttccctgtccctgaataccataagcaccagccttatcccggtactcttcggtgtctaaatacgtttcaatcatttcatgacttaacggccagaacgtgacatcagtttggacaaccgttttgcggatttcaccatcaatggataaccaaacacctgtataagcttgatgcgtgctgccactcaattgccgtaacatttcggctgcatcttgacgatcatgtggcttaccgtaaatcgtgccctgaaaactgacaacagtatcagcactgagcacagtggcctgaggattcttttgggcgatggattcacccttaagttgcgccaacatctgcacgtagtcagctggtgccgtcactggtacctggcgttcatcgattgttgcgggttggacttcgaaatcaggcacgactttttgtaaaagttcgcggagtcttggtgattgtgatgctaagataaacattattcgccctcccaactatggtgtggatcttgaatccgtttaaacattttttctaaatctttttgcgtgtaatggattaaaaccggtcggccatgtggacagttaaacggattttccgtctgtgccagatcaaccaacaatgctttagcttgcgcatcatctaagtgatggtgtgccttgattgactgtttacagctgatcataatcgccgttttttcacggaaatgggcaatgtctaacttcccgttttccaatacagtgtcaatcatctcgcgaatcgttgcttcttcttggccttgcgcaatccacgtcggatgactatggataacaaaactattttggccgaagctctctagctgcacacccactgcggcaaggagttccttttgtgcttgaatcttaatcgcatcactattgggatattccaacacaaggggcaccaataaattctgggcgtcgttgctaacttcaccaattttttcgcgatagtattcatacttaatccgttcttgagcagcatgttgatctaagatgtaaaagccatcttcaccttctgctaataagaatgtattgtgcagttgtccaatatagcgtaacgctgggaaacgctcaatgggtgctgcatcatcttcaggttgttcaccaaacggatttccgatcgcctctgcttcgtacttatcatcccaccgggccaattgttggggttgttcaaatatcggcaggctatttaaattaggattagcagttggttctcgtttaaggggtgtttcggtttccgcaatttgcgctgccgcttgcatttcagttttaaccggcttttcaggaactgtttggggctgaattggccgcaccgtaccagtcgcattgcgccgttgactcgtaatttggtttaaatccatttgaagctggtccacatcgaccggtttcgtttgttttagattctgcactgcatcgggaattaaattctcggtgctgagtcgctcacgaattgctttttcaatcaacgccatcaaagcaggttccttactcaagcggacttcttgcttggtcggatggacattgacatcgattaacagtggatccatttgaatatttaaaacgacgactggataacggccgaccattaattttgaaccgtaacccttgataatcgccttattcaattgataattcttgatataacgaccattaatcaacactgaaatgtaattacgactggcccgcgttagtttcggtagcgatacatagccggttaatttaaaatcgagatcttctgcactgactggcaagagttgcttagccattgtaacgccatagatcccggcaatcgtctgttgtaaatcgttattacccgccgtttttaacagcaggtgatcatcattggttaacgtgaacgcaatctgaggatgactcatcgccaagcgattgacgatatcgatcacgtttgccaattcagtctggaacgtcttcacatatttcaagcgggctggcgtgttgaagaataaatcacgaaccgtgattgccgtcccagggcgaattggattagttttctgttcttctaagacgccacctttaaaatgagcaaatgtccctaacgaatcagcggttgccgtttcaatcgtcaaatcggacactgacgcgatactggctaacgcttcaccccgaaagccaagtgactgaattttgaaaagatcctggcgcgtggcaatcttacttgtcgcgtgtcgcttaaatgcagtgggtacatcttccggttcaatcccatcgccgttatcgatgacttgaatcaattgcaaaccagcctgttcaatcacgatgtcaatttgagtactattggcgtcaatcgcattttctgccaactctttgacaactgaagctggccgctcaattacttcgcccgccgcaatttggttacttaatatttctgacagttcatgaattttccccattagcgttctcctttttctgacgtgtgggtatttagtgctaaaacgtgcttttcaagctaactttctgcgcttagcgctgtgaatcaaatcatcgactgcgtcgctaattcgcttccctgtgctaatgctcaaaagttggacaagcttgaatacactcttatccgaaacgtgctttcatcaacaacttcttccgctttaccccacttgccaaatcggcgattacatcgccaattcgtcaagtgctgtaaatgctcagaagttacccgttgatgacgcactcttatttgtttaattccttttgccatttgtatagcatgtttagcgcgtctagtggtgtggcgctcattaagtcgaattgtttaaccgccgctaggactttagctgcttttggatccgcttgtggtgccacttctggttcgaatagtgaaatttgttcatccacttcttcaaccggttcagcagccggcgcgacagctgcctttggtttatcttctaattgatccaagatgatatctgcgcggttcaacaacggtgtcggcatccccgctaatttagccacgtgaatcccgtatgacttatcagctgggccagccagcatcttgtgtaaaaagactaactcgccattttcttcaactgccccgacgtggacgtttttcaatgcggttagtgaatccgctaagctggtcaattcgtgataatgcgttgaaaagagtgtcttggcatgcacgttgtcgtgaatgtattcaataatcgcttgggccaaggccattccatcataggtggctgttccgcgtccgatttcgtcaaagagaatcaagctattttgtgtcgcgttcataatcgcgcgattggcttccatcatttcgaccatgaaggtactttgaccggaaattaaatcatcggccgcaccaatgcgcgtaaagatctgatcaaaaatcggtaagttcgcagatttagccggtacaaaacatcccatctgcgccatgatgaccgtcaaagccagttgccgcatgtacgtactcttcccagacatattcggaccagtaattaagagcatatccgtatcggtgcccatttgaaccgcgttgggaatgtatttttggcgaccgagcactttttcaaccactggatgacgcccatccactaaatcaatttcgcgactatcagtcattaatgtcggctgaacgtagtggtagttttcactgactacggcaaaactttgtaagacatcaagggccgccacacttttagcgagggtttgaagccgttcaatctccaacttaacggtttcgcgaacttgcgtgaataactcatattcaagcgcggttgagcgttcttcggcttctaaaatcaattgttctttcgcctttaattccggtgtaatgaaccgttcggcgttggttaaggtttgtttccgttcataacgcccttcaggtagcgcgtctaaattcgcacgtgtcacttcgatatagtaaccaaacacgcgattaaagccaatttttaaattatgaatcccggtaatttcgcgttctttagcttcaagttgtgctagccattgtttcccgttagacatcgcatcgcgataatcatctaatgtttcgttgtaacccgattgaataatcccaccgtcagtcactgaaattggcgcatcgggattgatggccgtttcaatgagctcgcgtacatcatcaaccggatcgagttggtctaacgcacggtcaaaggtctgatcgtcattaatgcccgttaaaatcgttttaatcgttggaatttgttccaaggaagtcttcaactgaattaaatcgcggccattaacactgccaaatgcaacccgacctgctagccgttctaggtcatacacttttgtgagggcgtcttgcaagtttgtccgttcaaaataatggttcatgaaactagcgacttggcgttgccggttttgaatcgcctttaaatccaataatggccgttctaaccattgttttaataaccggccacccattgccgtcttggtttcatccaataaccacaataatgtcccgctcttatgaccagtgcgtaaagaagccgttaattcaaggttcatcttcgcagaatggtctaattttaaatattgggatggctcgtactcttgggcccgttgtaaatgccctaaatggcgcttttgcgtcgttgccaaatacaagaccaattgtttaatcacggccagttcaaggggctgggagatgttttgtgaaacgaaactgacttcggccgttgcatcgccatcttcttgatacgacacgagaatttgttgttgaacaaacgcgtgcacaacctcactggcaacaccgtggttaatgacaacttctttggtttgtaaactcaacatttcgttgagcaataaatccaaactcgcaatctggctgactttcatctcaccagttgataaatcggtataagcaaagccaaactgatcgccatctgccaccactgctgttaagtaattattttgtttggcatggccggctttttcatccatcatcgttcctggtgtgaccagttgaatgacttcccgcttgaccatccctttagcggttttaggatcttccatttgttcacaaatagcaaccttgtaaccttgatcgactagaatatcgatgtaattttgggctgcgtggtgtggtaccccacacattggaattggatcatccgcatttttattgcgtgctgttagtgtgagttccaataattgtgaagctttgacagcatcatcattaaagagttcgtaaaaatcaccgaggcgataaaataaaaaagcgtccggatactgatccttgaccttttgatattgcgccatcattggcgtttctttcgttttttgtggcatgttgttaatccctctctcattgacgttgatctgctgctaaggtgcttaaaattgcgtataggggtgatctggtgaaatctggatcggtttaattgatttagcgtgacccgttttgtcatcaatttcaattaaacagccattcaattgacccggtccttcggtcactaattcaaaccgttctggccgttgtgttttaaaccgattaatgatcttttcgcgcttcacgcctagaatcccgttataagggccagtcatcccagcatccgttaaaacggctgtgccttcaggtaagacgcgcgcatcgtttgtttgcacatgtgtatgggtcccaactaacgctgaaatccggccatcaagataccaagcaagtgcgagtttttcactcgtcgtttcggcatgaaaatcaacgaagatacagttggtttctttactaatttcagccaccatttcatctaacatttcaaacggatcaattagtagttcattcatcaaggcgcgcccttgtaagttaatcacggctaatttggcttgattgacgttaatcattgtcatcccttgcccaggcgttcctttcggaaaattggccggccgcactaattttttagcatcgtcgatgaattctaaaatatcgcgcttattccaagtatgattgcccatcgtaatcgcatcggccccagcttgtaaaagattcttataatccttttgagtcatccccttaccatccgcgatgttttcgccgttgataatggtcacctgtggtttgtattgttgctttaatgctggtaggtaatcattgatcattttttgacccattgtgcccactgtatcaccaataaataaaattcgcatgttgcgccccttaatgttctttctcagactttgatatagcttctattgtagcaatttttgcccagaataaaaagttttgctgtacccgtagaaaaacaaaaaaagccccgcgcaccgaaaaggtgagtggggctgataatgtgcttttcaaaccatgttcctgcgtttagcctaattagccaaccaatcgacttcgtcgcttattcgtctaattttgctaatcctcagaacataatcggtttgaacacacttcttcttttaacgtgctttttgaaactgactcttgcgcttagctacaatccgcaaacgatcaactccgtcgctcattcacagatttaggctaatgctcaaagtcaaaccgtttcaaacacacttctcttctaacgtgcttttagttgcaccaacttccgcttaatctaaaattggcagtcatcccacaactcgggataactgccaattttgtattaatgctcggttgctaaacgcacttctttctttaacgcgctcctcgatcagtcttttccggttaactgcaaaatgagcatcatggcaagaaccgccacaatgcccattttactgttaatcctcaaagcctactcagatcgagtcgcacttctagtgttttaagtgataactatatgttgaaataataatgttttcgcggtttgcaaatgccgttcttagtcttagacttgattggttatgcaaaatgttttgccatggttttcttggtacgaattgtgggaccaagaccgtggttgtaaagttccgtttttgcgcattcttgctaacaatgtcaacaaagcgaacaattggtttttgaattgaccggtatgatgaatggacatcgacgaaccggacattcggaaaatcttccttgaattcagcttgaatttcacgttccttggctggattttcatccgttgagacatgcatcgcaatcacataatccccgattgattgtgcgtaatctagcgcaccacgggttacttgggtcacgttgctgaccaagacaatcacagttgaaccgtcataatcatgcaagacggcttctttagcactcacgcgtagttgaagcgccactttcttgtaatgatcatgaatcttatagaaaatccaaatcataacaggcatgatgatgaagaatggccagatatcaggtaagcgataaacgaagagaatgactaagatagcaaacgaaatcaaagcgccaacaaaattggcaattgatttaccaaaccaattctttggtcgttcgacccaccacttgcgcaacatcccagattgagaaagcgtaaatggaatgaacacaccaaccgcataaagtggaatcaagcgtgatgtatccccgttaaagatgaaaatcaatgccattgaaccaatcgccaatgtaataatcccgtttgaataacctaaacgatcgccacgatccatgtacatgtgtggcatatatttgtctttggctaaattatacgctaacactggaaaagcggagaatccagtattcgcagcgacggctaaaataaaggccgttgcaaattgcacaatatagaataaaaagcctttcccaaaggtgtgttgggccacttgtgatagaacagttactttttctgctggtacaatgccgtaccagtagtttaaaaatgtaatcccagcaaagaagaaacctaagatggctgccatgattgctaatgtttcagccgcgtttgttgcacgtggcttcttgaaaaatggtaccgcattactgatggcttcaaccccagttaatgatgatgaacctgatgagaaggctctaaaaatcaacgccatcgaaacacctggtacaacagccccaacggttgatgttgcgtggaacggaatcgcacctgtgaagatcttataacacccaacgatgatcattaaagtcatcatcaagacgaataagtaaacgggcaccattaaaaatgatgctgattcacgcatcccacgtagattcattcccatcaagatcaaaacgataatgaaggaaatccctacttgatgcccatacaatgccggaatggccgaggtgatcgcttccgcacccgcggaaatactaaccgcaacggttaacatgtaatccacaagcagtgaaccacctgccactaaaccagcatttttccccaaattttcactggaaacaacgtaggcgccaccaccacctggataggcgtggatcacttggcgatatgacaaagttaatgacaatagcaatacgagcacaaaggctgcgattggaattgaataccaaattgccgcggccgaaagggtcgtcaatacgatgacgatttcttctgtcccgtaggccactgatgacaatgcatcagaagatagcatcgctaacgctttaaagcgtcctaatttttgattaccctcatcggaagattttaacggtttcccgataaaaatccgttttaactgttgcatagcaatatgacccctttaaataatatttctaacataaaaagccctcatgtgaatatcattcgtcgcaatccacacagtgacttttgaatttctctataacttaaaaaaataattgccgtttattcaaacaaatcgtattctactatagttacgcatgaattactaccacaatttaaaaaagaactgaccaaggtaatcgaaacgcctcgattccttggtcagttcttattttttatgataaacgacgggcaaaatctggtttgtaatctgaaattttagtaattcgaactttatcgccaggttgtggtgcttggataaagtagccatccccaatgtagattgcgacatggtgggctgttccaacccctccccagaataataggtcgtttggttgtaattcattgagcggtacatctttgcctaacttactttgatcttgtgaaacacggggtaatttaatcccatttttagcgtaaacgtattgcactaagccagaacagtcaaatccttcgggtgtggtgccaccccaaacatagggtcgcctaaatatttaaccgcttcttggataatcttattattcggtataatttttcaagaattaaaacaaaactgggttgtaaaagtccgattgaatatcgaatttttacaacctagaaagctgcttaaagtttcgtccaatatttggggttcacttcaaacgctgttttttaatagccggctgacaagtctaccggattgacggataattcacctttgtctaaataactgggtaaattttgatcgaaaattttgaagagccgttcatggatatcagcgatgtaacctgaaatatgtggcgtgataatcaggtttggtgtggcccataatggtgaatcacttggtaatggttcgttttgggcaacatcgattgctgctcctgccaaatgaccggattgtagatagtgcatcaaagctgcttcgtcgactgaagcgccgcgccctaaattgaagaagtaagcccctcgatggagttgcgtaaaaaaggtggtgtcgaagaaccgattggtgaccggtgttaatggcatcacattaatcacgaagtctgcttgtggcaatgcttgttcgtaatccgtgtcggttagaatctgatcaaaattggcaacgggtttctcgtgccgattaacgccgattgtgtgcatacccatgacgtgggcatactttgcaatttcctcaccaatttgacctgttccaaaaatgaggagtgtgcggtgttccaaatttgtcatttgttcaccaatagcatgatgctcccattgatgcgctgcttgtgcgggtaagctctgataaatcccacgggtaaagtgtaatatgtaacttaatgccgtctgtgcgattggttttgcgtgcatcccgcgtgcgtttgataccagtaccccttgcttagctaacgtggctagtggtaaataatcaacccctgagcttgcggtctgaatccattttaattgattaccgggctctgctaaaattttcgggcctacatctttattccaaccaaacataatctcaatactacccagttgacttggttttaaatcagctaaagcgatgattgttaaaccttttgcagttagtgctttgacgtgttgttcaggaattgtttctgctgctaaaatgactgtcaagttgatccctcaccttattattgaagtaatctttattataagggattttcagcaaataaaaaagcattaccgactgaaaacggcaatgctttataaaaaattctattctttttctgcacgtggccatactggacgaccccagtattggaataaatcagtttgaatccgaccattatacaatttccggcgtttagttgcgcgttgcccgaatgattcttggaattgtaagtcacttgttaaaatatacttactccaagtcttcaatgaccgataggtatcacccatttctttatacaaagcacgggcttgtgtttggtcgcttaatcgtttcccgtaaggagggttggcgatgatgaccccgttggttaaatctgtcttgaaatctttaacagcgagttgtttgaactggatatcatgtaaaacaccagcttcgttcgcattcaacttagcgatatcaatcatgttttgatcgatatcataaccaaaaatttcaagtggttggtctttttcggctgctttcgcttcggctttggcattttctaaaacagaagcatcgatccaatcgaagtcttcaaaggcaaacttacgatgcataccaggtgcaatgttgtgaccaattaaagctgcttcgatcgcaatggtcccagaaccagtcgttggatcaacaaatggcatatcaggttgccaacggcttaaaagaattaaggatgccgcgaagttttccttcaatggggcttcccctttttcaaggcggtagccccgcttgaataaactaggaccagttgtatctaagctgatcgtcacgacatcttttaggatgctgacttcaagcggatacgttgcgcctgtttcagctaaacgtgttcggcggtgatagacagtacttaacttatcaacaatcgcttttttagtgatggcttgcacgtctggttcgctatggagcgttgaacggactgagcgaccagcaactggaaaagcggcgtctaatggcaggaacttgtcccatggcaaagctttcacttgttcaaaaaggtcatcgaaggttttggcctcaaattgaccaatcgcgattttcacccgatcagcactgcgtaaccagagattggtttttgcaatatctgccacatcgccttcgaaatacacccggccattatctgaacgtgtttcataaccgagattttgtaattctttggccgtaatggattcaatcccactcgccattgttgcgtatagttggtaagtcatgtttttaaagatccccttaggaaattattttttaaataaaaacagcttgggcaaaagcccaagccacctgattgtaaacctttataggccatgttttgttccagaacttccccaggaagaaagttccttcagtaatcatctatctgttcttacgaactctcatttttagttcatttccataaatgagacgcccctaccaaagtttgggttactcgctcgcggggtttacctcgttccaccgtccaagtttccaaggacgctccgtcactgtggcactatttaaggatattcacgcatgaccgaagttttagcgctttttccgccgttaccgttaaggtaccctggcttattgggccaggcacgaacactacaagcatctcagcctgtgcgggcatggaccttcctcagcctaccgatgtagaccgcgattactcaagatttacaaatgttgaatcaatgtttataagtatagcacaagattaaagatttgtctcgtcaaattgtgaatgattttgaactcttgtctgtggagcttgattttgttcacttaacttagcaccgaacacgtggcgttcaaggtttgataagcgtttcaaaatatcatagttggttgctgctgaagcttgttgtggtgcactttccttcacgttatcagaagcgctgagttggcggtttaattcgtcaaccttcttgaataagcgggcattttccgccgttagccgattgattgcttcttgataagtttgatagtctttaataactaaatcaaggtaaccatcgacttcttcaggttcatagccccgcatttttgttttaaattcttttttcaatatatcagttgggttcaattcgatttcaatttgattgtccattttgacacctcatttagaataaatgtactatgattcccattatagcaaagttatcagataattaaaactcttgctgatctaattccgctaactcagtcgcgatatcttgtagttcgaaaaaatcgaccaagttaatcggataatcttgttggtcttgatattggcgggctgcatgataatcatattctggtttgcccggtgattcacgatcatagtataatagttgaccatccgtatgggtcagcatgaattgttgatactggcgcaattgttgcggtccagaatacggtgcgttaatcactggttcgcaaaaatcgactcgcgctttgagctgactcaattgagcttggttattttcgttccattgttgaccaaaatcattaaacggcaacatcatcgccaattttaaatccggatagtccgtttttagttcaatagcaacttgcagactccactgttcaatccccatttggccaccagtgatcacccactcgagcccatcatctaaatattgtgttaactgcttttttaatgaatatttaattactttaagtttctcgtcagtttcgccaaaaacaccgagttcatagcttcgatagccgctcacccatagtcgtttcaagtcaggtccctcccaaatgattttcaattaaactaaacattgctataatagtgaaacaggagtgtgattttcaatggcctttcattatcctaacggacagccttatacaaataatgagacaaaaccaactaaaaagcaagcccggcaaccagaagcaacaacgttatttggtaaacgcggcatgacgttggaagaagaactcaatgatagtaatcagtattatcgattacatgcaacggctgtcgtgtataagaaaccaacgccaattcagattgtgaaggtcgactaccctgcccgcagccaagcggttattaaagaagcttattttaaacaagcctcaacaactgactataatgggatttatcagggccgttacgtcgattttgaagcgaaggaaacgaagaataaaaccgcgtttccgtttcggaacttccatcaacatcagattgaacatttcagagcctgcttgaatcaaggtggcatctgctttgtcattatgaaatttgtcccgctacaacggctattcttgtatcccgcaacagaactgattagccgctgggacgcgcaagttgatggtgcacgaaaatcgatttcactcagtgatgtgattgacaatgggattgagattaagtaccaacttaatccaattattccctacttagatgccgtagatcagttattaaagcggtcaaataaaggagtttaaagaacaatgtccgataatcgaaacaataataattcgcgagttgcaaggcacaaagctgaagcaaaacccgctaataagaaacgccggcccctctttttaagaattctaaaatggctgttactactgattgtagtggctttcatggctgggattggtttgtttgcctactatgttaaagatacaccaaacctaacgcaagcggacctgcaaagtccgaatgcgacaattctatacgatgatcaagggaaacctttcaaaacaattggtggcgaaaatcggagttatgtcaagagtgatcaaatcccgcaaacattaaaagatgcagtagtctctattgaagatcgtcgtttctataaagaaaaattcgggattgatccaatccgaattgcgtctgctgcagtcgccaatattactggtaaatcaccgctgggcttacaaggtgggagtactttaacccaacaattgattaaactgtctaaattctcaacgaaaaacagcgatcagactttcagacgaaaagcacaagaagcgtggcttgccgttcaagtcgaacgtcaatattcaaaagaccaaatcttagagtattatatgaacaaagtgtacctgaataacggggtcaatggtatggggacggctgctaagtattattatggcaagtcgttgaaggaattaagtttgccacaactggcattgattgcgggtatgccgcaatcgccaagtaattacgatccgtacctccaccctgatttagcgaagaagcgccgtgatttagttcttgatgcgcttttgcggaacaataagattacagcaactgaagctgccgaagctaaacaagtcccaattaataccggcttagtggatcaacaaacagtagcgaatagttcaacggattctaaagcaaccgacgcttacgtcaaggaagtcctcgccgacttgaagaaaaaaggctatgatccgtacacggctggtttgaaagtctacaccaatatcaatatggacgcgcaacgtaagttatacgatatcgtcaataatgatagcagtattccattcccagatgatcaactacaaacagcagtttcaattacagatcctaataacggtcgaattgttgcgatgattggtggtcgtaaaactggtgatgtgcagctcggttataaccgggccgtgcaatctggccgaagtaatgggtcatcaatgaaaccattaatggattacggtccagctatcgaatatcttgactactcaaccgcacagaaactacaagatgtcccttacacttatcctggaaccaatattcaattgcataactttgatggccgttatctcggtacaattaccgcgcgtaatgcgcttgccaactcacgaaacgtcccagccatcgaactgttagaagctgttggcatgactaaagcccgtgaattcgtgaaaggcttaggcattaacgtgccagctgatactggtctttcttatgggattggtgggaatgtttcaactgttgatgaagctgccgcatatggcgccttcgcaaacggtggaacttactatgcaccaacttatatccataaagtcgaaacagccgatgggattacgcataattatgattctgatggcacacaggctatgaagagttcaacggcctacatgattactgatatgttaaaagatgttattaaaaatggttctgggacgttagcccaaattccagggcttcatcaagctggtaagactgggacaaccgattattctagcgaagaaattgccaaatctgggttaaacccaactttagcgaaggatagctggtttgccggttataccaagaactattcagtgacggtttggactggatacgatgaaccacttaaaaatggattaacaatgagtgagcggaacgtcgccgcttatatctataaagcaatgatggcctacctcgctcaaaacgcaaccaactcagattggtcaatgccaagtaacgtggttgctaaaaacgtggctggcgtacgagaactctatattaaagggacgacgaccattccaagttcttcaagcagtcgatcttcttcaagtagtgtactctactctagctcagaagcaccggtcagctcaagcagtgaaatttctagctcaagtagcgtggttgaaacaccaagtgaatcttccagtgtgccggagacctcatcttcaagcaccccaactgaaagttcacaatcgcaaccttcgacctcaacccctccggcaacaactaatccaggaacggggtcgacgacacaaacaccagcagcgccaactaactaaaagaagcaccgttcagttcaacgataaacgttggctgaacggtgctttttttgcgttttttaaccacgatcttcaagaaattgttggcctgcttggcaaatccttaataagggacactcatcgcaatgcggcttacgtgccgtacagacttgccgcccaaaaagaatgagtgtgtggtgcgcttgaacccatgttttcttaggaagcttcgcttgaaagtccttttcaatctggatcaccgaggcatcctgtgcactgattttgagccgtttggcaatccgagtgacatgcgtatcgacggcaaatgatgggacgttaaaggcgtcacctaaaacgacattcgcggtcttacggccaacaccagcaagttgttccaattcggcatgtgtgcgcggcacttccccaccaaaatctgccattagttgctggcagcatgttttaatgtgtttagctttattatgatataacccgattgaatgaatatcagcctcaatatcggcaatctctgcattcgcgaaactagctggtgtcgggaaatcagcaaatagttgtggggtgaccttattgacggaaacgtcggtggcttgtgcgctaagcatcaccgcaatcaacaattgaaacggtgaatcagcaactaatgcgccctgcgcatctggaattaaattgtatagttggtgcatggcccactgtgttttggcttttgataacatccgcttcatctcctattcgattaacgtcttggatgggccttttggtaagcttgtagggattctttatcagtaatattttgtttctgccagttgagcaaaatcttatcaacgtacttcaaggaatagacttgatttaaaacggattctcgcacggctaattgaatcaattctggttgataatgatctaaatctaaccagttggcaacaatctcagattccaatggcgataatgggcggccaagagcttgttcaacttggttaaagaccgcactccgttggttaccgtctagtgcttgttgagtgacttgtgcgtcttgaacggctagcacgctcaatttagttaaggctggtgtgagatcgtaatggtcttcagccttaccttgttcattgacagatgatttaagggtaattagttttttctgtaaaagttgatgaatcaatgcgtaaatttggctggattcaattcccatgcgttcaccaatcacagctaaatcgggaaagtcattgttttgactggcaaaatcactgagctgtaagtaaaccactaattcttcagaagacatcttgagcgtttgatagtgatgcagtaacagtcgagagacactcaattggccgccttgtaaaaacgcggtaagttcgttcatattctagccttcttttctaaaagtttcattagttctattgtaaccaattttagacaaataaaaaagcgccgagaacctgatttcggttcacggcgctttagttaatcctcaaagccaactcgtttgagtcagcactctgatttgaaacatgcttttgaaagtagtcctcggtgctttgctacgtccagcaaacgatcgacttgcgtcgctcattcactagactagacaaatgctcgagaactaaccactttcaacgcactctaattcaaacgtgcttttgtagctaggttcctgcgcttaacaatgattgtcaaataatcgattgcatcgattattcgccaaccaacgttaatgctcagaacctaaccagctacaacgcactctatttgaaacgtgcttcttcgaactgccttttccggttaactgtaaaacgggcaccatggctgtgaagcgccataatgcccgttttgctgttaatcctcaaagtcaactcgttcgagtcagcactctttatggtttgattctgttaatcattcttgggaatggaattgtttcacgtaaatgatcgataccacagatccatgtaatggcccgttctagacctaatccgaaaccagaatgtggcactgatccgtaacgacgtaagtctaagtaccattgatattcttcaaggtctaagcccattgctttaatttcagcttctaatttatcaaagtcagtttcacgttcactaccaccgataatttcaccataaccttctggtgccaataaatcagcacataagtaaacatcatcacgtgttggatgtggcttcatatagaaaggtttgatggcttttggataattcaaaatgaagactggttgttcaaattgatccgataaataagtttcatctgttgcgccaaaatcatcgccccatttaatatcgaagtcagctgcttgtaacatttcaacagccttatcgtatgaaatacgtggatacggtgttttagtatatttcttcaattggtcaacatcacggtccaataattttaattcataggcacagtgatcaatgacgttttgaacaaggtaagccacgtatttttcttggacttcaagactttcatcttgagttgtgaaggccatttctggttcaatcatccagaactcagtcaaatgacgacgagttttggatttttcagcacggaaaacaggaccaaaagtgaagactttgccaaaggccattgcgccagcttcagcgtataactgaccactttgtgttaaataagcatcgttgtcgaaatattcgatgtggaataattcagttgtcccttcaggggcactacccgtcaagattggtggatccatcttgatgaagccttcttggttaaagaattcataagaagcgcggatgatttcatttctgattttcatgatcgcaaatgggcgttttgaacgtaaccataagtgacggtgatctaataagaattcaatcccatgttctttaggtgtaattggatattcgctgctgtcaccaattaattcgatgtcagaaatttcaatttcataaccaaagtgtgaacgagtatcttcatgaatgacccctgtcacccacatacttgattcttgtttgacatcttttgccaattggaaaacggcttcgcttacttggcttttaacgacaaccccttggaaaaaggcagtgccatcacgtaattggaggaatgaaatcttcccacttgaacgtttgtcggttaaccaaacgccaattttaacttcttcatcgacatggttttttgcatcgataatactgatttttttaaccataaactctgtctccttatgtgcaacatttaatttacaacagttcaaaataactgatagttattattatataacaaaaccctgacaaccacagccccctaattgagaaccctagatattttcaatcaattgaatcgtcttcccggttttaaaatcgagggttaaataacaaagacggcctttgtcacttttatagacaacttcccaaacaggcttgttgcggtacataccgaagttaatgttcagtactttttgcggatttttaattgaccatgtcttttctaacgcatcgtttttagaaataccaccactttgacgatagacagtggcatgattgcctttttcgttgattaaaacgaagatgccgtgattatcacggtctttaccactaacggtataatatgttgcatttcgatgatacgtgtagaacccatcaggctcttttaatttcgcgtattttttagcaatgttaacggctttggtttcagccgttgcttcgggttttcgagcttgatgataaatcatcagcatgctgccaatgattaccaacaataagaatatccagagccatctcttatatttgcgcacgctgcattctctccttgttcgcttgaataagccttattatagcaaaaaataacggctatcggcgcttaaaaccgaatcttagtgggaatttaaccaaaacaagtcggttaattcccggattattttaaccgacgctgctttttggggcaaacttgtcggtaacgcgcggcgcatttgttgcccatattgggtcgataataaccggggatctaaacaaatgaagacgccgcgatcgttaggggttctgattaagcgcccaaatgcttggcgtagtttaatcgttgcttttggtaaagcctctgctttaaatggattaattccttgggcagaaagttgagcgtaacgaattcgtgtctgcagtgcattcggcgcatcaaatggtaattgaacaagcaccactaattccagtgctgattccggaaaatcaacaccagcaatgaaactgcttgtcgccaacaagattgaatcgtgccccagcataaagcgcttggtaattttctccgcactacccgtaatcccttgggcaagaatctcacgatcaagcgataaaccggcgcggccaagcgcataatacacttgttctaacgcctgattagaattaaagaggactaacgcctgatgcggattgccaactaataacgttaatagctgttcagcaactgcatgatggtactcattgggggctaaattcttttgactaggaccatcttcagcgataaaaaagcgcgcctgtttcttgaagcggaatggactgcgtaatttcttagtcgctagtggttgcgcttcggtaaaaccaagttcacgtttcaaataatcgaagtgcccattaaccgcaagggttgcgccagtcaaggtgactggttcaaagtgcgcgaggatctgttgcatttgcggaccagctgaaagcaattgccactggagcttaaactgtggtaactgactaggttgtttaggctgtgtcatctgaatcattaacgcgtgttgttcctgcggtttcgtcgcaatgaataattgctcaaaccgttgataggcttcaacatccgccaacaataggttgatttcgttttcaaatgactgccaaatccccaaatccccctctgtatattgttctaaccgctgttcaagccagtaacgcaacgcgagaaaatgatcttgaatggtcaacagttggcggttcagttggtcgaattgattatgacaagcggtgacaaattgaaccacttcatctggattcaaataacgttcactaaacgcttgatgcgcttctggttgcggtagttcaaacgctgtggttaggtatgtctctaagtcactgatggttcggcctaacttggttaagtttttatgcactaaccgtaacgagcgggcttgcggtgattttttcgggaaaagccgggctaaattattattggcctgttccggatccgtatattgcaaccctttttgagaccaaagttgccaacgtgaaagtgaccaatcttgttgcgcaattttttgaacattgaaaatcatattttgtgcttcatctaagaccaagtatggtcgcgcaccccaggtttggtgatcattcgcgtgctctgccaggtaggcgtggttggtgacgagtaattcggcttgttgctggcgcttatgcaggcgacgtaagaaatcatcttgataaaacggcgcttgtggttgcagacttgttaatccccggtgttgcacgttattgaaaaatggtgtttggtaactcgttaaattgagttcatccaaatcccccgttgttgtttgggttagccaaactaagattttcatctgaagcaaccgcaccatccgattcttatgtggtaaacggagcgataattcaaagcgatgcaaatccaaatagtgacgcgggctcttaacgatttcggcattaatttggcgacctactaatttttcaagaagcggtctggcctgcgttaaaatctgatcctgtagcagcgttgtcgatgttgcaaccactaatttgtgttcaggcgtcatgcgataactataggggagtaaatacccgatggtcttccctaacccggtggctgcttcaattaatagtggttcaggtgcctcagattcgaaattatcgtgaatcatatccatcatggcagcttgcgctttacgccatttcaagtggggttttaataatcgttttttatcagcttcttccactggataatcagccgcaaaattagatcccggatagatttcaaatgattcctcggctggttttcgtagggcaatgttttcacgaattaagagatcgttcggcagcggtctcgattgcgcatgcatctgctcggcaatcgctgtgaagaaatcccctgtttgacgtaacaagcccgcgcctaacgcactaagacgttctagggtaactaatggcagggtcttcagccgtgccattaattttaagaataatttagccgttaccaaggcatcgctatcagcttgatgaggattgtcatgttcgatggcgagtaactgtgtgaggtcttgtaatcgatagctcggtgcttccggcaatacgatctgagccagttcaacagtatcgatgcccggcaaatcaagtggcggttgccccacgcgttctaattcgccatttaaaaaaggtaagtcaaagttaatattatgggccacgaaaacagtaccggataagagttcaactaacgttggcgctaaatcttcgaaaatcggtgctaattcgagttgatcagcagtgatatgcgtcaaatgttgaattttagtcggtacgtcgcgaagcggattaacatcttgcgaaatcgtctgaatgattttgccattttgaatgagggcgcatccgaattgaataatgcggtccccttctttaatgtttgtgccagtcgtttctaaatcaacgacggcgtaaattgtctcttggttcatgctgtcaccaatactttactcattattatatcaatcatactatgaatgacgcgtagaaaccagtctagttaatagcgactagttggccaatcgacaatagatagagatatttagcggttaccggccggttagcaatttgcgtcaacgcggcactgtataggttaatttggccggcataccgcgctttaatcgcctcaatggcagcttctggatcagctgggttcacaaaatcagtcttatagtcgaacaaaatacagtcggtatccgtggttacataaccatccataatcccatggattaagacattgtcttgatcttctgggcgtaaaccggcgaataaggatgcagccggtaacaatagtgaaaatgggacttcccgatgaacttgcgctggttcagctaacagttgctgacccaactcgctctcgaagaatgtcatgatagcagcaactttaatttgttgtgcaacattggcagtgaggcttttttgtaaaacaagtcggtcgatgacactttgcacccgatcgatcgttactggttgggttaaatcgatttcttgtaagaccagatgcgtcgccgttccaatttcagccggactcgcttttcgaacagtctgcatgaattgtggttgaggtaattcatcggtcacgtaacgatgggtttgttgcggtgtatcagcgtcaaagcgtaattgccccaactgatcattgtcgggatcttcaaagagccgtttcacttctgaaacagactggtaagctgtcgttttggtggcgccttttgctggataactgaatgttagctggtcttgaatcccgttggctaaatcagttgttaaatcgaccgccttgagtgccacttgttgttgctggctccaatcttgatcatggtgtaaagcacctggtaattcgccaaggcgcgtttcacttgtaaacgttaaattaaattcagttgcgtcatcgctcagaggtaggaatggtgtcccctcttcggtccaatcacgggcttgcggatgacgaattaagctcaatccaatccaatctagtaagttcgtgctagcttgacgaacagaagcgtccaaccgcagatcaggattttgctgtcctttttgccaagttgcaaatagtttcgcttggttatcacaactgcccgcgataatcagccgttgctcggcacgcgttaaagcaacatagagttttcgcatttcttcagcgcgtaacttttgccgtttttgggtcgtgatggttaattctggtagtgttggaatctttaaccgttttttcgcgtctaagtaaacaattccgagtcccgattgatcatcgagcacgtaattttggcgcaagtcttgctcgttaaattgatgattggcatccattagaaagaccaccgggaattctaagcctttactcccatgaatcgtcatcacagagatggcatcttgattggcgagactggttggttgggctaaatccttatcttgtttttgcaaacgttcgataaattggatgaactggaagagccctttaaagccgtttgcttcgtaagtcgcagcgcgttcatagagtgcgtgcaagtttgcttggcgttggcgacctgctggcatcccaccggcgtaatctaaaaagccggtcttttggtaaattgtccagattaaatcaacgagtggccgttgacgtgcaatggctcgtaactcatttaataaggtttggaaatgcgttaatttttcgaagacttgttggccgagttggccggatttttgtgcttcgaactgatcaagataattaaaaacggcttggtaatagtcatccgttttatcattaatccggattaatgcgagttcattttcgttcataccgacaattggtgaccgaagcacgctaaccagtggaatatcttgattgggattatcaataattttcaagaaagatagcatgatttgaatttccgttgtttggaaataattctgcgcatcactaatgacaatcggtaagccgaaccgttggaaataatcaagaatgattaggttgttgttgcgcgttggcgtcaataagacaatatcttgatagcgaattggccggatttcttgcgtatcccgatcccagatggtttcttgattatcaatcattcgtttaattcgctgtgcaactgatgcaatctgaccttcagctttatcaagcttgcccgttgattcttcatcagtcggttttgtttcgtataaaagtaattcagttggctgagttggttgatcgtcaggataataagtcgcaccatattgcaattcagcgttgtgatcgtaatctagctgccctaattggcggtccatgatttgtttaaagactaagttgacgaaatcatcgatattacgccgtgaacggaagttttctgcgagaataatgcgttcactatcgttatctggcttggcgaattcgtcgtacttaccgaggaacaaactcggatcagctaatcgaaaggcatagatggattgtttaacatcccccaccatgaagacgttgcggggtgcttgactagcgatagtttgaatgattgtttcttgtaactggtttgtatcttgatattcatcaaccaggatttcactgaatttattttgatagaacgttcgtgctgcctctgattccggagtgtcaccggccaaaatatccaaacagaaatgttctaaatcgccaaaatctagtaaatagcggcgtttcttctcagcttggaaggcttgcttaaaatcgcgggtaaccgtcactaacttaccgactaactcaccagcgcgccgttgaatctgactggtttgtgcttcgtcaaagacaaaataggttgttaaaagatcgtttagtgcccctttgacattatcgagggcgtttttgatccggtccttgtcatattgttcatcgggttctaatttcttagttcgtttggcgggtcccaattgggcgtcggtcaattgtgtgcgccactgcgcccaacttaaagtggccgcgttggcttgaatggcagttagtgctgcttgtgccgttgcgatagttggcaagtataccgcaaatttctcgtttgtttgacttagttcgttggcgagtgccaagtcttttaaacaggttgccaaggtcgcttctaactttggcagaatcgttgttttgaaataagcactggttgttaggccagtctctggtacctcgtaaggggcggttagagattgtaaccattcatcgggcgctggattggcaccagagaagttaaacagttcgaaaacaatgttggttagcccatcatcgttgcgatcgttcgaaaaattttgcgctaaatcataaaataaggcgtcgtttgactggtaatgttcttcgcgaacgcgttgccaaacttgatcctctaataagagacgttccgcagtatcacttaataaccgaaacgcgggatctaacttaatcacgtagtagaaatgtttaatgacttgtaagcaaaacgcatgcaacgtgctgatttgtgcggtcgggactaggctgagttgctgccgtaagcgttgttgcaccgctttgtcggttgcctcgcttgctttttttcgcagtgccgtttgaatccgttggcgcatttcagatgcggcggcttcggtaaacgtcaccaccaatagtgaatccacatcagtgccattcaagattttttgaatcacgcgttcaactaaaacggttgtcttcccggagcccgccgaggcagaaacgaggatatcatgccccgcgtgatcaacggctgcttgttgggttggtgtaaatcggcgatcactcatgtcgttcttcctccgagttcataattttggctaagacggcttgattatcaagcgcacttaattggcgataattattttctggtaacatcgcatcgaattggaaaatcgatttatatggcgacattgtgagtgcattcgtgcggtcgggccgcataatcggattcaaagcattttcgccagcaaaaatcgcttcccccgctgctttgattagttgatcgttatgggcaattaattgctgtaactcatcaagggtgaccagttgtttcgatttgaatgccccaatctttggacgattgaagttaaacagtggtgaatagccactttctaaagctgtatccaagttttcgagtaaggtctcatcgtttaaaattaagccatcatacttaaattgatccagtaataattgatcgagttcgcctttttgtagttgagcgagtttttgtttgttcagttgcttcaatgacattgttgggttttgaaggtgcagataaaaggccccggcaggttttaccttgctttgcgctggtaaaattgctgcttgatcttgcaagacagtttcaaggtatgtcaacatttgcaatgccaaaccatagtatgcatcgcggaagctaaagctgtgttgactggatttgtaatcaacaattcccaggtaggcttggtcgtttaatgtcagttgatcgatccggtcaattttcccccgcaccttaacccgacgttgattgggtaattcgaattctagaccagctaatccttgttgggcaccaacttggccgaataagacttcggttgccaacggttttaagttcgttcgttgactctgatcgcgcaatgtccggctgacgcgtttaattgtttgactcaattgttggcgaatgtagcccattcgtgctgatttattgaggatcttaaattctggttgttcatacgctttttgtaagatttcatccgtcaatgcatcgatttgttgattatcgagatcgggtaagactaagcgttgggcttgaatcatcttgataaattgatctaagacttggtggtagaaatcaccggtatttgcaggtgtcagttcaaaaattgggcgctcgttcagttttaagccgtattttaagaaataagcgtattgattttgatagaactcttctaatttcgagatcgacgtatggatttcattgccatataacccagtgacaatatcgcttgtcagtgcaacgggttggttatggtacgccagactttgaaggagttgattggttaagtagtgactaacaggaaattgttgtaataaacgataaacagtctgccattggtcaggaattagtgtttgcgtcgcttgtgcttgtcgcgcaacttgaatcaaatcgcttaacaaactacgccaagaacccgtaattggcgctgtacttgtcggaatgacttctgctagaacgcgttgctcggttaaatggaagtagtttttaatccggtcgacatagggggataccgtgtagttcgccccttccccattattcaatggataagtgaaatacaatccttcagtaccacttaaaaaggccaagtagttcagataaggttcaaagctcatctgactggcacttggatcagttaagaattgttctgaattgaaccgatcggttaatagttgccgatcatggtcggataataaggcgctggtttcaatctgatcaggcatcacttgatcggtcgcaccaatcataaaggtaattttgcggcgtttagtctgcaccatccctgattcagataaaacgacctggtcgagtgtcgatggaatttgcgcatattgcgccgtattaaacccggccgctagtaaatcccaaaagccctttagttcgaaaggttggtcgcctaataacgtcacatattcatccaacatcgtcataaatgtttgccatgtctgttccggttggccagctaaggcaatttgattggctgcgagtgcttggtcccgccaatttaacaattgtcgatcgacaccttgttcgattaagaattgatagagcactttagcggcatcgcgccctgttttggcactgtctaaccgtttataaaatggtggtaatacggattgaacataatgccgaatccgattgatccgttccgtgagcacttcatcttctgttgttcgaacaccatcttggaaggaaccgaaccgataatattgccaatcggctgcgcttaaccaatcatgcccttcatacccactttttaaaatcagattttcacacaaatcaagatcagcccggaattcagcgactgattgatagtcatctggtattaaaagctccgtcttcaaaagcgccattacatcttcatagcggtagtaatgctctttcacatcaaacaacgctgccaacatcgcaacaagtggatgggccgccattgtttccggtaaatcgcagaagtacggcacttcgtattctgtaaaaatcggcgcaatcattgtttcataaggggctaaatgccgagtcataatcaagaagtctcggtagcgatagtggccggtttggactaaacgacgaatttcacgggcaacataccgtaattcggtataccgattttcggcaccgatcacttgaagttgcgtcgaatcgatttccggtgctgttgggatctgaccgtggttttcagaagcaacccagtaccgatcaagcgcgagtaacgttggtgaaacccgctggttagtggcaatctgatcagtcatgatgggaatgtgattttgcttggcctgttggtataattgataatacgtacgctcagcttgataaaagaagctgagtttttccggtggttgttggtaattaacatagtcggtaattaaggctacggttaagcttgcttgctgcattaagacggcgactagcgcttgttcttgagccgtgaattgtgcgaaaccttcgatatagaaatgacaatcgtgtaagtcttgtttttttaaataatcagttaaggcatcaattaacgtcgtattttcgatgaattgcttttgcatagcggcttcaaacgccgtggcaataatggttatttcccgcaatttagtagtcagttcgacttcttcgggcgctagctgggccgcaatctcagttagctcatcgggtgtaatacagcccactttaagttccaatagttggctcgttaattgagcaacaaagcctgtttgattgacttccccaccaaataagctgagttcttctgcatgttcttgcaagaggcggtagacaaggatgtttaacccggcggttgaaatccgcggaatctggtagtacggggtatttttcatgaaataccaagctaatcgacttaatgagaagacttggacgcgtgaggttgcgacatactcacttccaggggtttttaggtcatttaaaagtgcgacttcagattcaaatttgatatgattcgggaccaaataaaaaaagcggtccgtgttggtggccttaaggtctgtttgtagttgcttgactagtgtttgatggtggtcataactagctgtaccaataataaattttaagctcatggcgcccacactcctttggcgtcattttaccatagatagacaagtgattgggataaaatccggctagtccgttggtaaaaagcgggtataataggaaacccattaacctgtgcccaatttgatttatgtggcggtcatttttgttttgcagtatagtagtaagggtatcttcaagtcagaaaaagagattaagggtgattgtatgcagactggtgttggccaaagtcatgcgaaaattattttaattggggaacacgctgtcgtttatggacaacctgcgattgccctccccatctttgcggttcaagcgcgggtaacggtaactctcgagccggcactccagacaccgcaaattaagagtacttattacaatggtcctctagaacaggctgttggtcagatgcaaggcattcgccggttaattgaacaactgtggcatgcattagatccgaacttaaccccgtttgaattgacgattgaaagtgacttaccgcccgaacgcgggatgggttcttcagccgcaacggccgtcgccatcattcgagcgttatttgcgacttatcatcaagagctcagtcaacaacggctgctaaagctagccgcgctctccgaaaatttaatccacggtaatccaagcgggattgacgccgcaacaaccggcgcaactacaccattatggtttgtcaaagggcagccgcttcaacccctacccattaatttaaaagggtatctcgtaatcgccgacagcggtcaaaaggggcaaacaggtgccgccgtcaaaagcgttcagaatcaaatgatgtccaatccagaacaaacgcaacccttaattgaccatttgggttatctaacgcaacaagtcgcaagaaatattgcccaaaacgaattaacggtacttggcgcgaacctcaaccgtgctcaacttgatttgcgggcactcggtgtcagcaatgcccgtgttgatcatttgattgatgtggctaatcagaccggtagtttgggcactaagttaacgggtggtggccgtggtggctgcattatcgccctggccgctacgcaaagtgctgcggatgatttggcacaagccttatcagcagctggtgccatcaaaacttggattcaaccactacacgcactttaaaaaagattaggagtattactatgggacaatcaattacagccagagcacatacgaatattgcgctcattaagtattggggaaaacaaaatccggaattgattattccgtataacagtagtctttcaatgacgctagatcatttttatacagatacaacggtccgcttttcaactgatttgactgctgaccaaattagctttaatggtgccattgcggataccaaaactagtacgcagatgagtcagtttctcgatttaattcgaaaacaggcgcatctgcctttatttgctgctgtggaaaccattaatcatgtccccaatgctgctgggttggcctcttctgcttccggttatgcggcattagctgctgcaggtagtcgtgcagctgggcttgaacttaacgatcgggatctttcgagattagcccgccgtggttctggctctgcaacccgctcgatttatggtggttttgtggaatggcaacgtgggaccaatgatttggattcatacgctgttcccgttcaagaaacagttgattgggacatccagatgattgcgattgtcttaaatgatcgtcaaaaagccatcgccagtcgtgctgggatggcgaatacggtggccacgtcgccctactacccagcatgggttgaaaccgctcaagccgcaattccggcaatgaaggccgcaatcgttaagaaagatataaatttggtggggcaattagcagaacaaagtgcgatgcagatgcatgcgacaacccttagtgccgtcccacctttcacctattttgaacctgaaaccctacaagcaattaaagtcgtgcagaccttgcgccaacagggtgtttcttgctattatactatggatgctggtccaaacgtgaaagtgatttgtaccagtcaggaaacacctcagattttagcggcgcttgcgccctattttagtcctgaacaactccttgttgctaaaccaggtcctggtgtgagctatcgataatgcaaatttaagttaaacgtgaaaggttctgatggtttgataacggctaaagcgcccggaaagctgtatattgctggcgaatacgcagtagtagaaacaggttttccggctattatcgtggctttaaatcaatttgtgacagtcacaattgaagagagtcatgaatatgggagtattgtgtctaaacaataccaagaaaattccctttattggcaacgacaaggtgatgaaatggtttttgataaccgcgataatcccttccattatattttgtccgcgattcgcttaacggaacaatacgcacgtcaagcgggtaagacattgcgcgtctaccacctacgggtaaatagtgatttagactctgctgatggtaaaaaatacggtttaggcagttcagccgccgtaaccgttgcaacggtaaaagctctctgcgccttttatgaattatcactatcaaacgaccaattgtataaacttgctgctattgcgcatttagatgtgcagggcaacggttctttaggcgacattgctgctagtgtttttggtggctgggtcgcttatcggtcatttgataaacaatggcttgctgacattcgaccaactgttagtctaacggagctgctcgaaatgccatggcctagtctttcaatcgaattattaacaccgccagcagagttgtcactcttgattggttggacggggtcgcccgcttcaacctcgcacttggtggataaaattgcccttgctaaaacagaacggcaagccgattatcaaaacttcctcgcagctagcaaagcttgcttagaagcgatggtcgaagggtttcgtcgtaatgatttagcccagatccaagctgaattacgccacaatcgtgccattttacaagatctcgctcacttcagtcacgtcgctattgaaacgccaatattacagaaaatgggcgcattagccgaggcaatcggcggtgctgccaaaacatctggtgctggcggtggtgattgtgggattgtcattattgatcgcgctatcgaaacagaggccctctttgaacaatggcgggccaatcaaattgaacgattgaaccttgcagttcacctcgtagattaggagcttacccatggtcagacccaaacaatccattcaatctcatcggaaagatgaacatgtctttttagcggaaaaattccgccatgatgatgccatcaatgactttgatggaattcggtttatccatcaaagcttacccgaaattgcggtatccgacgtggatatcagtaccgattttgccgggactaaccgggccagtcccttttatatcaacggcatgaccggtggtagtcagcagacaaagaaaattaacgcacaattagcgcaagtcgcccaaattaccaacctaccaatggcaactggctcccaatcggtagccattaaagatccgtcactagcggatacatttagcgtgattcgcgaattcaatccccacgggtttgtactcgctaatattggtgctggtaatgatttgaatgtggctaagcaagccgttgcaatgacccaagccaatgccctagaaattcacgtcaacacgccacaagaaattgtcatgcctgaaggtgatcaagatttctactggttagacgagattgctaacattgtcgccaatgttggtgtgcccgttatcgtgaaagaagttggttttgggatgagtgctgatacaatcgcgcaactcaagcaaatcggtgtgcaattcatcgatgtttctggccgtggcgggaccaactttgtcacaatcgaaaacgaacggcgtcatgataaagcctacgattacttagctgattggggccaatcaacggtcgaatcgctctttgaatcacgcgctttccaaaatgacgtcaatatcctcgcttcaggtgggattcggaatcccctagatatcgttaaagcacttcgacttggtgccagtgctgttgggatttccggtcaattcttgcacatggttttaaaagaaggcccgacacaaatggcggaaaacttgctcacttggcaagcgcagattcaagagattatggcaatgcttggcgcacgcgatattcaagcgctccaaaaggcgccaattattctctcgcctgaattacggcattatttgaatgaacggcacataacattttaagcagcaaaagcccggtagaaggatttcttctaccgggctttatttgattgcttaattagcaactacgactttgccaatcatttggttcgtttcgaccagttgatgcgcttgccgtaagttggctgctgaaattgggcttaagcactttgtcagggttgattgcaatttgttttgttccaataaggttgcaatctgtcctaagataatgccttgactcgctaaatccgttgtttgatagtaggtctttgagaaaacccactcccaagcgaactcgacccgttttttagttaatttttgtaaatcgaccgggcgatgattttcagtgattgaagcgatgcggccattgggcttaatcaggcgcgccatactctcccagtgttgatcgatgttattcaactctaatatataatcgaccgtttgatagccgagtgcgtgcacctgttcaatgagtgattgatgatggttaacgacttgatccgcaccatgggccagcgcccacttttgcgtttccggacgggaggcagtcgcaatcacgtgcaatccggccaaatgtgccagttgggtggcgatcgaaccaaccccacctgccccattaatgattaggatggtttgatcatgattagtggttcgatcttcaaaatcaatgtgtaatttctcaaataaagcttcccaagccgtcagcgctgtgagcggcatcgcggcagcttgcgcgtccgttaaattctgcggtgcttttgcgacgattcgttcatccactaattgatattcgctattactacctggtcgtttaaagtccccaacataaaagacacgatcacccggtttaaataacgtgacggcattgccaattcctgtgacaatcccaacagcgtcccagccaagaatacggggcgtttttgattgtcctctacccccttttcgaacgccaacatctacagggttaactgaaacagcggtcacttgtacgcataaatcgtgtggttttggtttgggactggggagattaaaagccattaaactttcttcatttgtaatcggtaaatgtttggtaaaaccaattgcttgcattaaaaatgccttctttcttattcaccattagtctaaaacattaattgccccgtaacaatcgtgtatcgaatgtaactagttacattgttttcactaggcaaatgactgctagcggactataatggcggtatcaaaggaggctatttcatggttcaagaacggcacatttatgattgtcaggcgggctgtccggttgaaagcacgcttcaaattatctccggtaaatggaaaagtgtgattatttatcaacttttgcaacattcggatctccattttggtgatttgacgcgcattttacccgattgttcgcgccgcatgttagccctacagctggaagaattaattgcggatcatgtgattactaaaacggtgattagtctccggccgttaaagactgaatatcaactctctgaatttggtcaaacactaagtcccgtgattgacgcaatggcaacttggggaacttattataatcaggttgcacaacaggatgttggatactgtaattttcagtaatgcctaaatttggatattcactaaagcacttgacaaattaacttggataatgtaaaaatatagttgttaaaagtataagtaaactttgataatgaagtggtgcatattgaaagaaacgaattatgtcgaaaataaagtctatgaataccgagtactccaacatctttctcaagaaaaattaggtcaagcggttggtgtttccaagcaaaccatctatgcaatggaaaaaggcaactactcacctagtttgattttagcctttaagctcgcacgattttttgatgtaccaattgacgttctattcacttatcgggaggcgtaacaatatggcccctactacactttttaaatcaaaatgcccatgtaatcgctggtgtggcaatcggattaatcatcatttcaattctgtttttctactatggtataactagaattggacgttcggatgaacgctcacagcttattatgtatcgcgtttttaaaacgatgtttgcagcgtgtttattatcgatgattttatttatgacttttgtgccagaccgcttaacagcagttcgagattggtttacaactctattcagtcttgtatttatcagtggcgcatgcgctgtttttattgaaccacggcgtaaagtttaacccttaaaaaaaacggtttagtcaatctaatgactaaaccgtttttttaatatgttgtttttcgtccttttggaattaaataataaaagataccgattaagatgagatcaatgatcatcaatccaataaaaatcgctgttcgacccgttaggtaaaagaaccaactaccaattgagaagccaatgattgagctaacaactaggtgcagcgcaaaaatttgggtttgtgccacgcggaatttacgatataaaccagtgctgagccctttttgtgcgtgataaccattgataacttggctaaataaataagtgaaaccgaccgcgatgatcatgaggacggcaattaccgcgattacacccgcattttgacggagccagttgacgccgactaacggcgtcgtcttcggtgttaaataactgtgcttagtcgttttgaaaatcttttggtaagttttcagatgcgctcccatctgcggaccatcaaccaatacggtgactttattcagtgggcgatcatttaatacaaattctggtgacgtggatacaaaaatgtgctgatcaagcgtagttgtctgattcgtaccgacaacgccaatcacggataagtagcgaccatgatcttgataatacgcttgactagctggtttgtagagttcagcaagtcgtgattgaccagcaacgacgactggaatctgtgatttgaaatcgtaactggagaagaaccggccgtcttttaatgggacactcgataacttccctttcgcatagacatatgagaaccgggaatcaacgttgaattgaatttgaaaatggcttaatttcgcggcatcaattttttgaatggttttttgaatcgactgttgactcttagaattaaaaatcacagcattttctgataaactattgtgatttaagcgttggctatagttagtttttgcacgttggctaatcgttaacatgcctagaactgttaaaccaactagtaaacaatctaatattatttttttcaggcgcacagtgggccctcctttaaagcagactattgaatccagtaaaaccgatcacgcattaaatcgaatgggcgtaagtaacggttaatccgtgataaacgggcgtcgttgtgataatgggccgccgtccaaaaggcgtgactattcgtggcgccaaaacgttcgcctaagcacaacaaaacgggggcatttggcattgcacgaagttgttgcagcaattcataatcaactgggacgccgttgggtgaccaggacattaagactgcatcgacttgcggaccatattttgggaccgcttgtttggcgtcaagagctgccactgacgtgactaattggcgccctgtttcattctcggcagtccaggctaaactatcggtacaaatcacatcagcgcctgcctgccgtaaaccagcacttaaatagccgttaccagccatgacttctagaaaacgccaattgggaaactcgcggacaatcgccgccgtcaaatctgtagtgatataggcccacatgccaaagcgattttgcaaatattcacggtaattgcgcagtaagtggtcgattaactgtaactgacgttgaacctcagccacactagcggcgctaaaagccccctgttcagcctggagtaatatttctaaatacagagattcatcaattcccaaaacgggtaaattatgtatgggcaagccgtcctgttcaatctgcaataaactagttaaaacagcatgaatttgtacttgaatggctgggacggttgcaaaaaaacgttgactctggcgcaatttctctggataacttaactgtatcataatggattccgtttctaatataagtttctcttaaacgattagaaaaaccttcccaatcggaaggccaaatcgaacgttttaacgaatcccgagtgcaatgcgtgcataacgggacatcttgctggtatcccacgctgggtaccagacgagattgactttaacttcattgacttctggaattttgcccattgcttgatgaatcgaatccgttaaaacatcggttaagggacagcccatcgttgtaagggtcatatcaatcgtacataagccattttcatccaggtttaaaccgtaaaccaagccgagattcacaatgtcaatcccgagttctggatcaatcacggtctcgagcgcggctagaatccgttcctttaagtcttcaattgctgcatcatcttgtggttggtctgccatgtgtcctgcctcctggtcactctaatagctctattatactggttcaaccgaccagttacaactgacgatcattgacaacaatccgcataccccctagaataaaaagacatatcgtgttttaaccaaacacgtttttaaaaggaggcgccgctatgcatcaaaaattgattgcactggatttagatgggactaccctcaattcagatgcccaaattacacttaaaacgcaacaaactttaactgaattacaaaacgctggccacattgtcagtattgtcacagggcgcccaaatcgtttgagtgaacctttctaccaacaattaggtttaacgtcgccaatggttaactttaatggggctttaatgcacattccgggacaagcctgggccggtgaatatcaatatacgattaataaagacattgtctttagtctcttccaactaaaagaacgctttaagattcaaatgattgccgccgaaggtaaaacgatgtttttagctgatcaagcttatgccaacacgttttctttcttccccacaacgttgaagtccgatgaaattttaacccgcgaatcgcttcggcaagacccagcggccgtcacggtttttgtggaacgcgctgatcaagatgcgttacgtgctgaaattctgcgccaattccctgacgtttccgtcaacacttggggtggtcctgctagcgtcttagaaattgtgcatcatgggattcacaaagcaaccggcctcgcaaaactagcggcacactacgacattgatcaatcagatatcattgcctttggtgatgaaagtaatgatttggatatgttagcctatgccggtaccggggttgcgatgcaaaacgcaattgcaccgatcaaggcgattgcagacgacatcacaccactgacgaatgcgcaagatggtgtggtcaattatttacggcaatattttaagatggattaatgaaaaagcgattcgacaatttctggtcgaatcgctttttttgatggatgaaacgtgcttttcaagctaactttctgtgcttagctacatccgtcaaatcaccgattttgtcggtaatctgcctgattaggctaatcctcagaagatacccggcttattgcacactctattctgaaacgtgctccgtcagatatacacttccggttagttacataccgcaaacgatcggctacgccgctcattcacggtattagactaatcctcagcgtatgaccatctgacgtcgcactctatttttcgtcgctctttagcacgccgcctactgagtagcggtctggttgcatttcgtttaggacaacgtgcacgtgttctgcaggtgcgcctgtgtttttagtgattgcttctgtgacgtctgcacagagttgttttaattgtgcttggctccggccagcgattaaatcgatgtgtactaatggcatgtgtggtgcctcctttaattgaatacttatattatgcctgttttaacgcaattgagcaacggtaattactgtgtttttaagcaaaagaatgtataataatagctaatattgatttatctatggaggcattacaatgagtgaacccctttaccgtcaattgacggcctgtaccagtgttttagttggtaagaaagccactgcagacggctcaactttaatcgcacgtaacgaagatagccaggcagcttggcctaaacatttaaccatccatccccatcaaaagttaacgactgccccgcactttgtctcaaaagacacgggtttttcaatcgatttaccacttgaagccgcaaaatacacggcgacacccgaatggaccgatgaatatggactattcgaagaagacggcattaacgaatacggcgttgcgatgagcggcaccgaaagtgcttatagcaacagtcgcgctctcggctttgacccctacatcgacaacgggattgctgaagaagccatgattacagtcgtcttaccttacgtgaaaacggcccgtgaaggtgttgcgcggctaggcgccatcgttagtgaatacggcaccactgaaagtaacgggattctcttttccgatgtcgatgaggtctggtatcttgaaatcggcagtggacatcactgggttgcccaacggattccggatgatagctatgccgtggttgccaatcaacttgcgattcaagaagtgcaattcgatcaaccggattggttcatgacttcagaggggattcaagattttgcgcgtgataatcacctatggcaagctgatacgccatttaacttccgcgatatctttgggaccaaagaccaaagtgaccttgtttacaacacaccgcgcgtttggtacggtcaaaaattgttaacgccatctgtcacccaacaacctcaagactttaacctccccttcttacgacaagccgatgcgcccattcaagtcgaagatgtcgcgcgaattctaggctcgcattatgaaggcacggtctacgatccaatcggtcacggcacaccacaagaaaaacatgctttccgcccaattagtttagcaaagacgcaagaatcacacattctccaaatgcgccctaacttaccggttgatgttagcggtattcattggttatcaatgggtgtcacggcgcaaagtgtttacgtcccattctatgccggtgccgatgacgtcccagtcaattaccaaaaagggacaaaggattacagtcaagattcgatctactggacctataaattagctggtattttggtggatgcacactacgccaagttcgccaaggacttggaacaaacgcaaaaacacatcaatagtttgatggttcaaaacatcgtggcaactgatcaagcggttgctgctgaaactgatgcacaccaacgaaccctgttgatgaccaaaggttctgctaaggctgcacaactcgcacaacacgaaatggaacgcctcaccgcaaaactgattacggatagcgcgaacctatcaccactcaactttacaacggatagtaatttatagataaaaatggtcccacatcgtattttgatgtgggaccattttatttactcagcaatcatctctctaatcttgtaagttccacttgcgtatctaacttctacccgataaggatgtccatggacaactgatttagaaggagtaaatacatttccatttagggaaccatagtagttttggccattggtgacttctgccagatagctgttgtttcctaatacgactatcttataatgcttaaataattcgttagcaaaggtaacgacgattttattatttttaacactcatgtcagcaactaaagtgttcaagaacagttgctgtgcatggttaattctttgagtcaatatcgtcttttccgagcccttaactgcgttaatttgtgttcgtaattgatctaataggtcttgtgtgacctcagatttcaactgatcgtttgtttcaaataacgcttcaacttgacgtttcagaagaagaatatcctgactaatcattttgagaatgtaagacttgtgcggtaattcagccactacggtaacaacatgtgcatccgcttggttaagaattgttaagacattatcgtcgagctgaccaccactactgataccatttttgacctctgcaactggttggtcgtcaacaagtaccttaattttcgcatagtctttaaacttctcatcagtaaacgataccactaatgctgattgtgaatccagttgaatatctttgactaatgtagctaggtatttgtcttctaattttgtaaatagttctaagagtttttctttatagtcaaaagtagaaggaagagcatcaattcgatttcggagagcatctagtttagcttgggttagaattgtaccaatcggttctgatgcattcaaatagtttaataactcttcttcaagtgcaatactatcaattgagtgttcatatcgtttaaaagtaccatttttattttgctgttcaattgtaatcacatcagtcggtttaagcatctcgattgtttcccaaacattatttgttaacatactttcaattggctctttattgacgagtttggaaatcacttgtccattctttttaaggattaattgctcatccttaaatacatcggtttggtagtcagtcaggttaacttgaataccgtggtcattcagcgatacggtatcgattaagcgcatgggtaactgtttattagtttctttatcatttaaccaaatagcttctggtaaaggtgttaattgactaatttcagctttaactgctgcggaaatatcaaatccccattgttcgaaataaggctgcatattataacccgtaattctagaaacatttagaacaaagttttgcatccgctcattgtctggtccaaatgcaagcttgttttcacgatagtattgatgtaaaacggggtaaaagttatcaccaaatgtatttcctaattgaccaaacataaccatctttaaattattattttgtgcgttgaattgcttattatcagattttagataagtatgcatttctgggtagtattgatctaacgatgttattttaccagtcaattctttttgagccgctaatgcataaatgttaacacttgattctacaacagcaccccatttccaaggtgtttgttgtctctgatgaccactttcatgccagatgccccaaccttcatttgtcttcagtagtcgttgcaaagcgcgatcattatggaagcccataaattcattttctgtatacatatacaacttaggtgactctaagaaatgttggagatggcgatcaacaaagtttactagatttccgtcagtagtaatgcctgaaacccgatcttgtgccgttaaaaaccgatcataataagtcatcagttctttagggtcaccgagatattttttagccattgcgtaactaactgtaattaatgctttgttactgaccaactgcacatctttagcattcgtcatttccgccatttgtttctcaaagtctgcgacgctagtttgatttaaatcgaaatatggcattgatcctgttgccccctgaaattgtgattgttgcttcaccagaatcattaggattagtcacataaatcgggccctcgttttcaacggtaatcgttgtaatgccctttgttaatggatattgtttttgattttctcgttcgggcgaaccaattgtgatagataatgaatcttgcatcccctgagcaactgtcaaaacatcccctttttgggcgtataaaccgctaggctctaaacttgagtagcgtaatgttctgcgttgccggtctttttctttaaaaacatcaccacgaccaatataggttttcatttcttgtggtgcttttagattttgctggtgcctcaccttggatttgaggctatctgctagcacgctactcgctaaattttggtgattgtcacttggttcagccttaactgtttgtatagaactgatggtgctagttgttaggattcctaacgctaaaattccgattacattcttgatagtctcatcccctaaaagtattattatttttataacatattcagattagcatggactgctgaaaattgtctattaaaaaaccctaatgatttctataattattctattaatattaaaaatgtcaataatgataactacaactattacatttaagaataaatcgctctataattgtgatgacagtgtttacaattgtgtaaaataaaataagacccaccacttattaagtgatgggtcttattttattcagttataaatgtattataatgaacacccttattaaagtaattccgctaccaatggccaattgatcatcttccaaaagttttcgatgtaatcaatccggttattctggtatttcaggtagtacgcatgttcccaaacgtcaagtccaagtagtggtcgattacgactcataagtggtgaatcttgattaggcgttgtcatgatttgtagttcaccattttgatcgataacaagccatgcccagccagagccaaatacaccaagggcagcttcggtgaatgcttcttggaacgtcttaaacttcccaaagcgggcttcaatccgttcgagtaattcccccgttggtgcttctggcgcattcggtgttagaattcgccagaagaaactatgattggcatggcccccagcattattgcggacaggtgtttgaagattctcaggtaaatcatcgatgtgtgttaacaaatcatgtaatgatttacctgctaaatcggggtgcttggctagcgccgcgttgagttttgttacataagtcttatgatgtttgtcatgatgcagatgcattgtttcagaatcgatatacggctctaaggccacatattcataaggtagtgttggtaatttaaatgtcattgttcaccctccttgttataacctcatcatacaagtctatggcgttaaaaagcgaataatatgattctacgaccattgaaaaaagctgactaatgtttattagccaactttttttgaatcctgggtagctgcgtatcgatttctgccaacatcatgttcggtgtcttatgttggaaaaaaatggtgtagtccgcaagccgataatactttggtcgtcgttcgtgatacagttcgcgtaaaccatcgtggcccaattgattcacaagtggccgccgatcattgcgcgaaacgcggcgccaatgtgcttcataactcccatttaggaaaaaaatggggatatgactctgttcaagtaaatggcgcgtctgagcatcatccacgaccccgccgccggttgcgataatcccatcgtgttggatcaatgtctgtaaggcctcaaattccatttgtcgaaatgcagcctgccctttttcggcaaagatttcgttaatcgtcatttgctgttcttgcatgatgtagcgatccaaatcaatccagtcacaatggtaatgatgtgcaactttgcgtgcaatggtcgttttaccagaccccataaaaccgattaaaatcagttgcatctagtcaatcaacccctatggttctatttcaaatatattgttggttccaagactgctccgcacatacggtcagttaaacactctttacaagttagtttcattgtaaggtatctgtgggttggttaccagttttttttgaaaatagattagccgctaaagtcgttagcggtatggattgaatttttggaacaccaattgcatcgaggtaaacaagattaatggcatctccttgattcttcttatcatgtaaaagttgcgtgaagagtcgatcactcataagtaacgggctatctgtcggcaagccgaccgcatttaaaacagttgtaatcactggtgttaaatgcgcttcagtcagtccactttgttcgactaagtgctgcatggcaactaacccgatgctgaccgcttcaccgtgcatcaggctgccattggccagggtttcaaccgcgtggccaatcgtatgaccgtaatttaataattggcgttgattactttctttttcatcggccatgacaatctgtgccttgtagtgcacactttgctgaattagtgtttcagcctgcgctagaatcatatgcgcactttgaatccctgtcacctgttgccaaaatgtcccaccgttgagtgcagccactttaacgatttccgcataaccggccagtaattggcgttgatccagcgacgttaaaaagtcgggatcaatcaatactaaatccggctggtaaaaagaaccaactaagttcttgccagctggtaaatcaagtgcagtctttccaccgacactactgtcaacttgtgccaaaagcgaggttggcatctgaataaatgcaatcccccgcatataggtggacgcgataaaccccgccaaatcaccgacaaccccaccacctaaagcaatcaccccgtcatgacgggtaaaattcgccgctgccagttgggaataaagtgccattgcttggtcaagtgatttcgacgtttcaccagccggaataataatcggtgtgacttgatagccaacttggattaattgagattcgaccgtttctaaatacaacggggcaacattcgtgtctgtgattaatgtgatttgacgaggtgtccaaacttgcgcgatttgttcagcacagatgtgatacaaaccagattggatccgaatctgataatttttttgtgtgaggtggacatcaattatcaccattagtgccgccactgtttgacgactgcatcaacggcccacacttgatgacacatttcaagataagtagctggctttaaggcttgtgcgccatcagaaaaggctttttctggatgatcatgaatctcaacttgtaacccacttgccccagttgcgactccagcccgagccattggcgtcacaagatcccattcaccagtcgcatgactcggatcaattaagactggatagtgcgttaatttttgtaaaactgggacagcatttaaatcaaatgtgttgcgcgtatagtgattgtcaaacgtccgaatcccgcgctctaacagcataatttgttgattaccgttggcagcaatgtactcggcagcatttaataaatcatcaacagttgctgctaaaccacgttttaaagcaacgggaacgttggtttttccaacagctttcaataatgaaaagttttgcatattgcgcgccccgatttgaaaaatatcggtatattgcgccactaaatcaacatgcgtttcatccatcacttcggtcacaacgtccatttgataagcatcagcagccttgcgcaatgctttcaaaccagcttcgcccatcccttgaaaggaatacggtgatgtccgcggtttatacgcgccaccccgcagaatagtcgcaccgccttctttagcaactttggccatcgccataatgtggtcagcagattcgaccgaacaaggacccgccatcaccgtgaagtctgcaccgccaatcgtactgtgtgctaattcgatgaccgtgttttcgggttggaatagccgactgccaagcacgtaactcggttcatccgtggtggttgccgcaatgacttcttcctctgcttgggtaaaatcaattgcttttgcaccgatcaccgctacatggtgcttaatctgatagacattcggatttgtcgtgcgttgtcgtgcgcaaaaatcatcaatcagcgctgaatcagtatttggtttaaattgaataatcataaattattaaaactccttcgttaaagcatgatagatgggatcggtttgtaggacctggcccgtccagaattgaaaactcaacgcggcctgttcaactaacatgccaagcccgttttgggttggatgaccacttcgagccgctaactgtaaaaaagcagtctgacgtggcgcatatattaagtcggcaactaaacaagtcatcggtatttgaccaattaaaggtgctgccagcggtaatccaggggtattgaccatgccaagattcgtggcgttaatcacgcaatcagcattactgagtgcttgttggagtgcctgttcatcggcataattatgtagcacgatggacatcgaatggtgattagcaatttttgccagtcgttgttcaaccaccgcataagtcgtattttgacgtttgaagacctgaatcgtcgccacaccatagcgagcggcggcttcgataaccgcgagagcagcgcccccaccacccagaataacaatctgctgactagctagattgggatatcttttctgcaaagcgcgccaaaaaccatcgccatcagtattcgtgcctaccaatttacccgatcgtaaagcaaccgtattgatggcgccaacgagttgcgcagttggcattaactcgtccattaatggcacaagcgactgtttatagggcattgaaagattaacgcctgccacaccaagcgtccgaatcgcttttgcgacatcttgcggccgtgcttggctatcgaaaaccagataccgcgcgtcgatttgatgttgtttaaaacccagattatgaatcatgggtgacaagctatggtgcgctggatgcgcaaccaagccgtaaagagctgtataacctgatatcattacattttcctctaaaactatcatactttacttaatgagatttttaaatggttagtatcaaaaagtcatgcttaatactgttattttttgtcattatccggtaagattaacatagattgaaaacggttaatataatagaaagaggtccttaataatgtcgatcgaacgtcaaacgttatccgttaaagaacaagcatttatagttgatgcatattggttaacacccattccagatttcgagcatccagttaaacatcccgtcatgattatttgtccaggcggtggttttacgtatcattcaggtcgtgaaacaacaccggtcgcgttgcgatttttagcagaagggtttcacgtgattgttctcccctaccaattaataagttcgactgaaaccgtttatccgctcgctttacatcagcttgctaagacaattgagtgggtgactgatcaagctggagaatatgatattgatttggatcgaattgttttgactggtttttcagctggtggacatgtggtcgctacctataatggcattgcgaccgatccaatccaccgagctgattacgggttagatgattaccgtggtcatcatgcagcgattgtcttaaattatcctgtgattgattttgacgctggttttccaattgatgatgcaactaagcaacagattacagtggaccaaactttatggcacgcacaaaaaaatatcacagcagcagctaaaccagcttttatttggcaaacagccacagacgcccttgttccagcaacgaattcacttctatatacacttgcattacagcaacataaaatccctgttgaataccatctctttggagctggtgttcatggcctttcgcttgctaatcatgtgactcaagcaccaggcaaaccagaatatgctaatactgtagcagctcagtgggtcccacttgtattggactggtttaaactgatggcaattttataagaacctaaaaagcaatggatacagtaatattaactgcatccattgcttttttgcttatttacggtctgccttattagcaatacctaattcttgacgatatttagcgacggttcttctagcaactttaatgtcatacttaacttttaactggtccgcgattttttgatcagacaatggatgatgggcttcttcttccttaacaactgtttgaattgcaatgtgcgtctgtgtcaaggtgggaccttcctctaaagttgtactccgtttggtcaacaaattccgcagaagatagataccattaggcgtccgaattgatttttctttaatcgttcggctaattgttgattcactgagctgcaattgatttgcgatatcccgtagaatcaattgattaggatatgcttgttttccagtaatataatcccactgtgccttgattaggacttcagcaaccattaataatgtttgcccgcgcttatgcaaactcgtgtttaacatctgatactcggcatatttttgctgaatgtattgtttggtagcgacatcgacttctttttggaactgcgcgtaacttgcatgttcaaaaatcagcgttggtcgcccaaattcagtcaatagtagctgatatcgtgagccattcatcttaataatgacatctggcacttgaaaattagttggtgagtcatcaaacatatttcctggttcaagactcagtgcacctattttgtgtaaaatcgattgcatgtcatcttgactaatggctaactgagtttgaatttgtttaatctcaccagctaataattgttcaaaataatcagttatcaccaaaatactaagatcatcagccggataaatagcagaggcctgtagtaataacacttcttgtgcatcacgaccaccaaccccgattggatcaagttgttgtagtaacgtcacaacgtcttgataagtggtctgatcaatttgattttcttggataaaacgggcttcatccacctttaaatagccatttggttcaacctccaaaatcagccgttgcaaaagttgctgtaatttacctgctttaaaccgataaccgacttgttccaacaaataatcgtataaattacctgttccgtgagccgctagctgatcaaaattgaattcttttgtacaggcttcgacggacccgacctcaaacaaggggttctctaaactacgagcttttaaataatccagtaggtcgagactattagattgcaaaatttttaaggattgttgcaatgcaatctaccgtattactattattgtactcataagacctatgaaatagaatcaaagatatctttttcagtttcctctatttgagaataaacatatttatatatcttcttatccaaaggtgtttttctatttatattcttaatttttaatatctcacttaggataaaatacttatcatcgttagaatacttgtaaaaacaatttgaatatctctcgatattttttttacttttgattgctctgtaagatgtaacaaatgaatttagatgtaagtgcccaacacctctcgattttcttacaaaggtacttaagtcaaggggcgagtctctaaacatagaccgttcattttctgatagtgaatctattgtcagagttcttaagttatccctatttaagtttggtaaatattccattaattttccctttataaatctatcaagttgatataatagctctatatcatttatctgtgaatagaaaaaaatccacccatactttgattttttatccccatttttaaaaattgaacctgctataaaacaatttaatctaaaaatgagatattctggatttttcttattctttaatactcttatcatagcaacaattctttgttttattttctttatatttacctcttttactgaaacttttaaggattcatttttcttatataaagaaaaattataccccaagaaatctaaatcaagagaacttatatctccttcctttatttttttagaattaatacttaatttattactttcaatttcttttaaaaaaagatttttaatctcttcttttttttccatatgacaaataagtataatgtcatcaacgtacctaaaaacttctacatctttcctccgcaacgctaattcaattttcgaaaaatatatctgacttagttcagatgctataggaattccttgcggaactcctttataattcttctttcgaataggcaatgttggattctgaatagcctttcggcaagattctattaagaatttatcacttatatcaagaattccaactttattaataattaattcatctatctctttaaacaaaattttatgattaattgagttaaaaaaatgtctgatatcatactttgctatatatacgtcttttcgtgaactcacctctcctaaactttttatcaactttcctataacctgttgtggtaaaggaagttttagactagaatctaagcgatcaatttgatttaaaataaaatataaaaaaagcttatcttgaatggttggtatagataaacaccttggatattcatttctacctttaattaaaagcatttccttatacggtgacaacgtataagattcattatgaatagagtcgttcatttcatttataattgcatctttattatttctaaaatagtcatatgagcgcccatcaaccccaacagcacatccatatttaatcttttcagatagttcatttaacaaatcaatcggctctattttatttatattaaatatattttttcccaaagcgaaatttttcttccccataattcaaatcccaataatagcatagtaagtaatgaaaaatataagtgcccccaatgccacaattatcagagaattaggcactattttggttaagtaaactatcaatttttctcctaacttacaactaaagttttcattttccggtgcttgtgcgaacttgaaatatatgtaatcaatattattatggttgtcgtattttcttaatatttcattatactttttcttaatactagataactctaaatcctctgcatccaaatagagttcctgtaaatcaagatatgagttcttgaaattatttgctgagacttctaaattccaatttgtaactatcaaagttaaagatacaacaattattgaaagcatcaaacttagcaatgagaaattaattatttttttattttcagttacacataaatccaacgttgacaaaactacaattaacgatgttactaaattcaaaaaaatagataacctcgagtttaacctcagacgtatttcttccgcttccattcttattttttctgttacccagacattcttctcaagaaacgccttcttttcatcctcacacattatttttacctcttttattattcaatttaagtggtgtagaaatacaatagaatatctttaaaagacttctatgatggttataggtatctcaacttccgatacaattagatttagctcaactctacttaatatagtattttgtaggatttaacaggtcacagttacattatttctacaccacatatatagtatattatgaaatagtcctaaaaacaaaaaggttttatcttaatctatattaaaagaccatccaaaggctgcttttcaagcgacttttagatggtcttttaacattattttgaaaaaattcattataattatttagctgatttacgttccttcaagaagttcaatacagcagctgtttcagcgttacgttttttagcattgttttggttaacaggacgacggttaccagaaacactaacatgtaagttttgtgacattgcgcgtttcctcctttcgtgcatatattctattattctaatctgaattgacttatttttcaagttaactttattcgtcttttggttttctgaaatagtttaggagccaactggtcagcggaacggttgctatgaccccaatcactccgattaatagtgcgagtccctcaccaattaaaattttatggttcacaattttactaattggataaccgagttgaatgaaccacatcgttaatgacaagaagctaccgaaaaaactaaagaacagtgtgttaaaagccgtcgcaataattttttcaccgatcgcaatccccgctttaaagagttgcttggagcccatttgcgcgtcgtattctaagatttcgactaaaccactggcaactgcaatactcgtttcggcgattgcccctaagctgcccagaatgatcatcatgatactaattttttggaacgacaagccgattgcgagtccaaagccttcaatctcttctgcatcttccgcaccaaagccgtaggtagctgctaactggctgaggggcacaataatgatcagcaagcccaccaccacgattaacgacgtcacaaacgccgtcttggccgttaatggctgcttggtattcatgaagatggatgtcgctaacaaaatcagactcaacagaccactcacaatcagcggttcaaacccacccgccaccaagaccagtgccaatataatcacgacaaaattcaaaccaaggctgaagaaaatcgtcagcccttgccaaccacaaaacagcactaataagatcagtaaaattcccgttagcaacatcataggcgtctcacccgcactaactggcttgccaacaagctcgttactggcaccgccaaagtaatcccaatcgcactaatcaccgtctgcgtaaaacttaacgtgacagttcgcgataaggtatacgcaattgtgttgccattgcgtagatacaataaaataattggaaaagcatccgccatgactaaaaagaacaacacattaactaacggaccaataatttcgcgaccaattgcgagtcctgatttaaacaattcagtcttcgtaacgtttggccgttcaatcgctaattgctggagtgacgatgaaatatcggtcgtctcatccatcacagcgcctaaaatcccgagcacgacttccgctaagaagaccgttttatacggctgtaattcataggccatcgtttcataatgcaagccttgatcgccggttaatttcaagacggccatgctgagaaacagtgctaggaacgttgcgccaattgtcgcgccatatgagacaagcatctggcggttgggtcctaatactaaaagtagcgttaaacccgttagaacgaccgctaagccacacataatcggcaataaccaccgtccacccgtcatcgcgtttaaatggagtgttaagacgaatgcgacgagattgaccaagacactgattagcgtcatcaatccgcgcttgagcatcattagtaataggaaactaaacgtcaacagtgttaagccaacgatgattgtatcgcgcttaggctcgtttaaggtccactttttcaaatattgatcacggtgtaaaaagacttgttgtcctttatagtaccgcgtcgacatcgcttgcgacgccgtatacgtattgcgcagcgtaatcacttgccctttttgcttagtgttcaaaaattggcccgtgacccgctggactacttctgtatcttcattttggtactcatcagtctgtttctcacggctaattgtctggacccgcgttacccgaataatcggttgctgatacaaaccagcatcgaaatacgtccctaatacaccgaggacgcagatgacacttcctattagaccaatccacagccgtttatgttttaccacagtcgtcacctctgttttattctagcgtttctgcgggtgaacgtcagctttttgaggctgatttaatcattatttaagcgactattgaaaatcccatacgtaaagtagaccactaagccgatgacaaaccagattgccgctgcaatccaagtgacttttggcaattcaaacatcatcaataaacatagcgctcctgatattaacggtaaaactgggtaaaatgggactttaaacccatttttattcggaatgtccttgcgcttccgcaatgggatgaccccaatcgacatccagaaaaaagccaccaatgtgccgatgtttaccaaattagtcaattgatccagtgaaacgaacccgcctagaatcatgatgactaccgtcacaattttgatactgttagttggggtttgatgttttgcagtcactttaccaagtgcttttggtaataagccatcacgaccaattgaatagatgaggcgggaactgctgtaagtcatcgtcaacatcatcgtgaacatccctgctaatgcgccgagtgaaatcagaccggcaaaccaattttgatggacgacttgtagcgcgaatgtgaccggattagcaacgtccaattcgcggtacgacaccatccctgtgaggacaaacgccactaatatataaagcaacgtacagatgattaacgtcccaataatcccgataggaagatttttttgtggattcttaacctctgccgccgatgctgacacacagtcaaagccaaggtaagcaaagaagacgagtgatgcccctttgaaaatcccacttaccccaaacggcatgaacggttgccagttagtgggtttcacgtagaaaatcccgacactaatgaaaagtagcactacgcctaatttaatcaaaaccatgatgttattaattcgtgttgatgaacgagtccctcgcattaataatgtcgcaatcaagcccactaccagcatcgcaaacaggttcacataagtgccatgtgccggatcaaacgggccagtaattgcatgcggaatatggatgccaaacccttcgataaatgatacaaaataagccgaccaaccagttgaaactgccgcaactgacaacatatactccaagaataaagcccagccaagcagccaaccgattaactcaccaaaaataatattgccatatgagtaagcacttcccgcaactggtaatgccgatgaaaattcggcgtaacacatcgccgcaacggcacaaacgaccgccgcaatcataaatgaaatcgtgattgccgggccactatgtaacgccgcaatcgttcccggtaagataaaaatcccggtcccaatcactgcccccacgcccaatgcaattaaatccttagccgttaatgttttggccaaccgctgatcttgttgtaaataacgttccagtgattcttttcgtaacatctttgccattaatcccattttaaccactcctatttttattgtatgcactcgactaggcgattactcgccgcctaccaggcttcgtcgcacttctttaacgtgctccttgaactgccttctgcgcttaactacagaattacaatggcggtcgtacgcccaccactgcgcttcttaggttatgctcgaagccaaatcgttcaagtcgcacttctttcttaacgtgctcctcagccagatacttccgtatagctacgtccagtaaacaaagctacaacccagctttattcactggactatgctattactcagtatctaaccaggcttcgtcgcactcatttaataacaaaaaaaggagcccactagtcttcactagtgagctccaccaggaaaatgactcggggttacccagccatcttccaattcattaaggtttgtcatttcaactcaaatgccttctccttaatcaaccagtcgattactgggtatcttaaagaaaaagctaaaggcaacacgttgcattgaattcatgacagaccctccttgttattaattagttatttagtataggggataaccatctatttgtaaaggattattttaaaagttgtttttctaaaaataatctgctagaatcaaatttaacttattcaaaggatgtgactggcattgaaaatcgcatgctaattttctgacaactcgattggtacgaactgttcatgcacgtgcgtggaccgtttatttccgattgccgttagagattgcttgcgttaattttcaggtcagttacctaaagacttgttaaaagacgctgttattgcgtctttttttgtgcatttttaacgacaactgggccaatctcattcaatcaatgaggtgataattcatgggcacaattcaattcaaagcactcacatttaactattcagatcaaacacaaccgttgttcgatcacgtcacgcttcaattcgacgccagttggaaactcggtttaatcgggcgcaatggtcgcggtaaaacaacgttattaaaattacttcaacaccaactaccatttgatggccagttggttaccaatctcgattttcaatatttcccacagactgttacagaacctacgcaactcacacgcgatattctaatgcagctaggtaacctcgacaattcaaccttctggcaagtcgagcgggaactgcggctcctacaagtcgcatccgaaatcgtctggcaaccattcgattcattaagtcctggtgaacaaaccaaaatgttactcgccttactattcatcgacgactatcattttcaactgatcgacgaaccaaccaatcacttggatcaagaaggccgccaagtcgttgccaattatttacgccaaaaagccggcttcatcgtcgtcagccatgaccgccactttttaaaccaagtgatcgaccatgtcctagcgattaatcgtgccgacatcaccgttcaccaaggcaactaccaaacttagcaaaccgcccacgaccaacaagctgcttatgagcaacaacagaatcaacaactcaagggcgatatcaaacggctgacaaaaacagcacaacaaaaagcgcagtggtcccacgaagctgaaaaagggaaaaacgccgccagtgtcaaaactgaaagtgccaatctcgataaaggcttcatcagtcatcgcgccgctaaggttatgaaacgggcgacgacaattgccaaccgcgcggaagaagcaatcgaagcaaaacaacaactttttaaaaacgttgaaattgctgcaccactgaccatcaatcagcgacccctcaaacccggtcaaaacgtgcttagtgttgatgaacttgtcttacaacaagacggcgtcatccttaatcaaccactctcattcaccttagaagctggtcaacaggttgccctaactgggattaatggcgcaggtaaatcaacactgattaaggcgttacttgcattacccgcaactgaccacattgccagcggtagtctgcaccttaatccgcacttaaccctctcgtatcttccacaagatttcgatcaactgagcggctcactggccgacttcgctgctgcgaaacaggttgatcacgaacaactgctaagcatgttacgcaaactgggttttgaccgcgatttatttacccaccgtctagaaacgatgagcatgggacaaaaacgtaaagctgcactggcacgttcgctctgtgaagaggctgactgttacctctgggatgaaccgttgaattacctcgacgtcatcacgcgtgaacaagttcaaactctaattgccgagcaacgcccaaccctcctatttatcgagcatgatgttgatttcgttaacgccatcgccacccaaacctacgcacttcgaccacaacactaatacgtattatttgtataccgtgtcacgttatatccgcgcacgttgaagtaagtcgttggcgactcatcatcaaaaaaggccgggttcatatcattaagtcgcgtttcggtattggttaacgtttgttccggcagtgctaaattttcacggagccgattcgaagcagcctgcaaattttctgtactaatgatttgataggcactgccgttaagccacgccgttttacctagcaattggctgctgacaatttcaccactactttgatgatagttgcgaatcaactgcttcacttggtcggctgtaaaatcagtgctaattttctgaccaagcttagtcattaagtcaccaatgttcatcaaatattttggcttttgaattttttgcgcaacttgtttcaaaacttcttgttgccgcaattgccgcccatagtccccgcgcggatcttgataacgcatccgactataagcaagcgcctgatcaccattgagatgatggtggccttgtggaatcacttgtccattcaaattaacgtcaatcaccatatcgatggtaatcccccgacaaaatcaaccaattctttgagtgcgcccatatcgaccgtcaccgagtagtcaatcgggagccctaaaaactgactgactgtttttttcgccatcttagccttgccaatttcataagccgcattaattttctgaatattaccgccgtggtcatctgccatctctgccaatgaatcacgcggaatagagtagaccaccgttgcttcttacgccgggttaagtgttacaaccatcatcgaatccgacagaccacgatcaacgtgcccatccgcgcctgtgtcaacgcctaataataggaacgagattggctttcgctgatcaatttgttttgaaattcgactagacccggttttaatcgcatcaacagctttatcctcttgatgcaaataaaaacctagcgccgccagactaatcacaacaatactactgattacaatcacgatactgatctttttcacagtcaattcccctttgtttaaacgcccaccgcatccttttttagatatgaaccaataaatgctgtcccccttttgaatcgttcgattctggcggacagcattttattttaacctttgctttaaccgacgtaagccaactagcatgaccggcgctaagtgcgaccgattaagccatcgtagccaccgggatgtgccggttggtaaaccacgttctaaattgatcaattgcgtctgaatgaattgtcgctcaagaacagtcagtgtgcgctgatcaaaaacaattaacattctaaaaaaggtccgcacatactgctttaaaaatcgtgtgtaagctacgcgatccacttctgcaattccagccactaattgcatctcaatgatgtgcagagctgttaagttaactgagaaccactgcggctttagggtactcgtagccgcctcagcatgcccaatctcataaacatataaaaacgctgcccgatgcctaacaactcggcaatgttgcaaatactgcaagttgaaaattaaatcctcaccgatacgcagcgattcatcgaaccgcaatgcttcagcttcaataatcgctcttcgatacaatttattacatgattgaaagaagacattttgataatagtagtctaaaaaagcccttttgccgtcttgtattgatagtcaccatcttcagtcaaaccaaaagcagaatccgttccgccggctctttcgattttagttctgaatagcacccaatctaccgactgaccgacgactggttcaaataattgggcactgttaaccaagaagtcatcggcattctcagcgtcaagttaagcccataaactaatcagtcataaaacggctgcatcaaaattacttttgatgcagcctctggttcaagcatagactaactacgctttgtttgttattaatctaatttccgttccaactcactaacaatttcagcatgttttgcttccgttaatttaatcttagccatgaagattaacgctgaaataaccaataacgccattggaatgaagaacatgtacattttgaattgcaacaaccccgcgttagtgatatcgcttggtttcgcattcccagtcatgccagcatgaatcgcagccgttacaacgacgccgtttgcaaaagccccggctagtttatccaataaaggtcgcactgccaatgttacagattcattccgtgtaccacttttcaattgtccgtattcaacactatcggtaatcgtcatcaaagcagccaaaaagaccagtggatatgggaagaagaataagccgaccgcaattaagactacgaccaagttacttccagcaaacaagaagaggatataaccaagcatcatcattgcgattccgccaagatagattgcccggcgatgaattaaagcaaccaatgttgggaacaacgcaactgacacaatccctaagatggcagtaatcacaccaaccgttgagaacgctgcggcgcggcccatgacatatctaaaataatataaaagcagtgagttcgtaatcacataactaaaggcaaataagaaatatgaaagagataaccacattaattggtcatttttaccaatcacactgaaaacgtcacgtaaccgaaccttttcagtattttcccgaatagcactcttttcttctttggttcctaagatggttgctaaagcgcctaagaatgaaacaaggccaatgacaacggcaaaaccgaaccacccggcactggtttgttcactcccatgactcccagaaaatagttgcgagaagaaaaccaccattggcacgatcacgataatgaccccttgtgcacctaaagtggatccgaaacgcgcaatcgccccaaattttgtccgcttttcagaatcaacactcagcgctggcaacattgaccagaacgagatgtctttaaacgagtagaagatatctaaaatgacgaaaacgattgcaaaaagaactaagtaaagataagggctacttgtcgcaagccctccaaagttggtaaaaatcatggccaagccaacagagctaataattgaccccgccagtaaccacggcttaaatttcccccaacgcgtccgtgtattatcaaccactccaccaatcagcggatcgaaggcaatttcaacaatccgaatgaccatcattgtataagtgacatacgcaatcatttttgaattaaagcctgcatttttggtatcgaataattgactcgtgacgaacatcataaaataagtgctaagtgttgcataaaaggcgtcatgcccaaaggccccaaaagcgtaagaactatactgtttaacatcttttagttttttcatttctttagattcctttcgatagtttcttcattgtaaacatgctttcatcaagcacaaccctcgggttatcccgcttgatgacgcactctagtgatagcgatgttcgataattttttccaaaatcgcttggcgttgcttttctttggctgagccgaattggttttcttccaatgaattaaaatcgttggcgagtaaaactgattctagatataacgtcaattgacgcttgatataaaccttattgtcttcattcgtttgcttgggattcccagcgataattgctgcagcaaattggtctggatcgataataattttgttgtcgttcatcctagtcgcttctttctcttttagttagtaaacgtttactatttacaccatacaaataaatcaatctgtacaagaactatcctgtaaacgcattcttttagatcgcaatcttattttactaaacttttagtaaaatgtaaacggttatttaaaaacgttacctcttgttgatttacccaaaataaaaaggctactcctacgagcaacctttttatcaattcatttatttagtctgaaatttaaattttgtccacggttgaagcatttctaataaatctaattcctccggtttaattcgtcccactttatttttgcggctatcttgatgcggttcaaggacaatctgaacctcatttttataaatcccaaactgatcattacctatcacaatatcaccaatttggaacgtttcctccgaatcatgtggcgcgttaggcgttgttttataaatcacacgagattgtgttgaacgagcgactaatgcattactatcccctcttctgaagtgttgcattccaaacaatatttccctttcaaccggtgcaatatctggcatcaactctggtgtaaaagctaattgataacgattaaccgctgctaaactttgcaattcagcctcactcgcgtaagcattaccgataatgacatcatcaatcaaccccgttgcaaatagccatttagcctgagattcaattggtaaataacggtccttctcaagtgttggtaaaccatcatttacattccatggtccctgatcaccgttttgacttgcaacaaatgcggcagtgtgaataccatgctttttaaatcgctcactacatgcaagaaagaacgggactgttaacccagttcccacttgtggataaaaattatgacacccaaaaatgtatggttcgtttgcttgataacttaaaatgttatccaaataggcaacattattactcatattcaactcaataattaaatgatatggattataactaataagggcttctgtactcccatcaaatccttgatctagtcggatcccatcaacacctaattcagcaaaaaaaccgagttcctgatagctaatccctaattgatcaaaaatacgtggtgaaatatcaatcattgtttgataacccaaatctttcgcaacttggataatatgttgatattttgctttcgtttctgcaatatcaccaacctctaacatactcatgaatagacgagaaaaaccatattggcatcctaattttaaatacgcttcgtcttcttgtggaatgctgtgatcaggataaatggataaacctagttgccgaaaagtcatttgaaatcctccaggataaaattttttacaccagccgcattactgccctcaagtgttacaaattgaaccgtgctcttttgagccacttgttcctctacatggtgctttaataattgattatgcgtcaaaactgagccggttaaagcgattttgattggtttatcagttaaaaaacgctcccgcattaattgaatttgttgcgctaactgattagcacatacctcaattacacttttaaactgttcattattttgaccttgttccgctaatattcgagcttgtgcagcaatttgctgccgtgacatttgataaaaatcactaatcgcttccgttggtgatacataattcaaagccgttaggattaacgttgtcatcggtccagtttctaactgctgattcaattcctgtgtcatctgttgatagcaacgtttgacaatgtcatatgcaccaccttcatcgcctaatagatgcccccagccaccaatccgatatcgttttggaccttcttgtcctaagacaattgaacccgttcctgcaatcactaatatgccggaattgtacccaaatcctttcaacattgctaaatcagcatctgaaattattcttacaggtattgagaatcggttcagtaaatatgcttctattgctgtttgattatttgcactctgactacctgcaacgcccgctaaaatcaattggcattcatgcactttattttgattaagtaacgtttcaataactgtttctaaattaacaaaagtctgttcgtagtttaataagctattacctggtccagcacttgctgttcctagtaacatcccatcctctgcccaagcctctgcttccacatgggtgccaccactatctatcccaattcgatattgcataataagtatctcctttcagagcttgactaatttcatgaatacggatacattataaccagacggaaattttatttcaactttttatataatttgaatttatatttcataacaaaggtggtccttactatcgcactaatgactcttaaatataacgacacgatacttgacaatcaaacaacaatcacgattatgctaccggataaaattaccggaccattgcaatcgctctatgtccttcatgggctaggtgatgatggtagtgcttggcaacgaaaaacttaccttgaaacattagttgccgattatcaggtagcggctatcatcccttctcttcctcgtagttggtacattgatcaaccagatggacaagcttgtttctcatttttgacgcatagtttgcctacctacctcagccaactattaccattatctccggaaccccaagatcatttcattatgggtaattctatgggcggctttggaaccctcaaatggctcaacacatatcctgatttttttcaagctgcagtcgtcctatctcccctagttgacttggaaatcgtaccatcattgatgccggattatcgtcatgttttcttagatgaacctttaactaattatcaattaacaaaaccatttaagttaactcaaacacctatttattggacgattgggactgatgactttttatttcaacaaaatcaacattttctagacaaagtgtctttaaaccccgctagtaaagttgtctttagcccaggtcgacatgactggctattttggaaccaagcactaaaccaagcactcgcttggttacccttaaaaaaataatggagtgattataatgtattcaacaaccgaacaacgtaatccagaaacacttaaaatagatcagctcgatacacttgatgtcttgagcctaattaatcaacaagatcaaagtgtgccctacgcaatcaatcagcctgaattattggaacaaatgagtaagattgtcgtagaaatgaccactacctttaaaaatggtgggcgcattttttatatcggtgctggtactagtggccgtttaggtgttctagatgctgttgaaattgtaccaacttatggcgtttcacctgatcgtttcgtcccacttatagctggtggtcaacaagcaatgtacgaagctgttgaaggtgcagaagacaatgctgatttagctgtccaggatcttaaaaaccagcatttccaacctggtgacttcttaattggtatcgctgctagtggacgaaccccctacgtcattggtggtttagattacgcccattctttaggtgttaaaacagcttcaattgcttgcaataaagatgcactcattagccagcatgccgatttaccacttgaaattatcgttggtccagaagtcgttaccggttctactcgaatgaaagcaggaactgctcaaaagctagtgctcaatatgctttcaacaaccacaatgattaaatgtgggaaagtttacggcaatctcatggtagacttaaaaccaacaaatcaaaaattaaaaatccgtgcaaagtcaattattcaagaagcaacaggtacaacagctgctgttgcagaaaaagcatacttcgaagcacacgaatctgcaaaagttgcaattgtgatgctgagcgcaactgttgattatcaatcagcagttactgctttaataaacaatgatgaccgcgtagcactcgctatcgctgcactcttaaagaaatgagagacaactatgcctattattgccaaaatcaagaaacattacagccttttctcaagtgctgaaaaaaaagtcgctagctatatcatgaatcaaccggattccgttctacagatgactgtgcagcaattagcttcagaatctgaaactagcgctgccaccgtcattcgactcggaaaaaaaattaatgtggatggttttacaccccttaaaattgaattagctgctgacttaacacaaaccacaaatacttttcatccagatattacaaaaggcgaacaagttaattcaattaaagacaagctcctttataatgctcaaacctcattgaatgaaacagttcttcaactcgatgaccagcaattacaaatgattagtagaaaattatcaaaggttagaaatttaatcgttttcgggattggcgcctcctacttaactgcactaaacattgctcaaaaatggggacgaatcgggattgccgtcacaccatttaatgatttggatggtttacttcccttattagtaaacgccaatcagaatgatttaatttggatcatttctaactctggtgagtcatcagatgccattcaagttggaaaaattgctaatcaagttggcgtccccattctatctcttactcaatcagggaataatagtgtttctaaattaagtacgatagctgttcacacaagtcaaccaattgagtttccagatcgaattgccgcgaccaattccctacttgtgcagtttactgttgttgatattattttttatgaatatgtcagccataactacgatcaaagtattgaacgactcggtaaatcagcagaaattatcaaaacaacacaaaagaaatctctgaaataatatttcattatctttttttaattttatatattgaaatattatttctatgtgctaatataatggtaagcgctttaaataaaatcttggaggtttaaccatggaaaaatttatgaaatgggttgaggaaaaactcgtcccgcctatggctaaagtcggtacacaacgacatttattagccattagaaatggggttgtctcaactttatcactaatcttaattggtagtttcttcttaatttttgttaacattccgtataaaccattagccgatttactaacaccctacgctgctacaattgctctaccatttagaatgacgatggggttaatggcaatctacgcaacctttgtaatgggatctgacttggcaaaatcatataagttagactcaactactggtgggattttatcccttggtgcgttcttcatgctacaaatgcccgttaacgttcttacacctaaagacaaaccactcggcttcgttttaccaatggggagcttgggtgctagtggaatgtttactgggattttagcaatgatttttgctgtagaagtttatcgcttcttctccgttcataaaattacaatcaagatgcctgaacaagttccacctgctgttgcacgttctttcgaagcacttattcctggcgcaactatcttagtgacattatggattattcgcgacattgcaggctttgatgtaaataatgctttactcgcattattcaaaccaatcaccggcgtacttggtaacaacttgtttggtgctttactcccaatgttcttaattcatattctatggtcatttgggattcacggaatgagtattgttggttccgttgttcgcccaatgtggctcatcatgctcgacgataatgcaaaagcattggcaacgggtacatcagcaacgcatcttccttacgtgacacccgaacaattctaccaatggactgttacaattggtggtgctggcgctacaatcgttgtagctgcactcttcatcacaatttgcaaatcaaaattcctgcgtgaagttggacgattctcaatcattcctggaattttcaatattaacgaaccaatgattttcggggcacccatgattcttaacccatacctcttcatcccattcaatgttgtaccacttgttttaacaaccgtttcatacaccgcaattaaattacatcttgtgaatggcttttcaacattccaagcttggacattacccgcaccaatcggtggtttccttagtgctgggaatgactggcggattgttgttttaattgccgttaaccttgtcattgcaactatcatttactacccattcatcaaggcgtatgataaaaaaatggttgcagatgaatctaaagcagcggcagaagctgcataaaaggagaactcaacatgctctattggattttaatatttttaggttttctaatactcttaattggttgccaatacctattaaaatttttaaatcagcacggaattttaattaaccgttggatttggggcttgctctcctttttaattttaattgtcccacatgttatttggtcacatattccaactggaattgatggtattctatacgctttatgtgctgtttttgccattaatttcatgattgaacaacatgcttatgttcagcaattaaatcaataattatagaaaagccccgctcagatgagcggggcttttctatattatttggctaagactgtcatttgattattataacgtgcttgattatcaaactgcatcaatactttagtcgctagatcttacgtcgcaaaaactaatctttcaactggcgtatttgccacgttgtaagccaccatgtgtgaaaaataaacaaactgtaacatattgctgtatgccgaaacatcgccttgtttcacaatttttttaacgaaaaaattaacgatatgatcgccaaaacgaacataacctggaatcgaaatcagttgtacgttggactgtttagcagcctacacacgattggccgcattatctggcgcgtaaatgaccgttgtccctgtcgtttggtctgttggttgcattgtaattaaagctgtttttgacattaatagatactcctcttaagtgatgataaggtccattgtaccagagattaccgtttattttagtaattctagaaaacggttctgccaaacgttttcgtaaaaggcaattgtctattcagccgtcatataggcgttgtccgttgtagttgaaagaccagctaccatttggagttggtagcccaaatggtgggcaactttaatcgttgtatcgacgcagtatttggtctgggcaccacaaatttcaagcgatttgatttgcatttggctcaataacgtttgtaagtttgtctgccaaaatgaatccgcatgcgttttttgaacaaagattgccgttttaggcacattcaattctggcattatctaccaagtcgactgaccagcaattaaagtcttatcgttatgttggacaaaaataatcgggcgactttccgcctgataggcatcaattctggcattaacgcctttaattaattgattaagacgcgcaacaggctgctcacttttgcagacaccattttggagatcaatcactaataaacaatcggccagcttcaacattagtcgcctctttcctttaaatcaaatcgagtatatcattatttaactaaacctcatattttgtctgacgatattaaaaagaagagatgcggattacccccacctcttctttttcaatgtctccgatgtttttcccgcttcttaatctggtgttgctgaaaacggctgtattgtatggccttcttttcggcatgttgttcagccctattagttgcatgttgtgctttacgttgacgacccatccgaatctttttgttgataccaacgaattgaataccaatgataactgacttggcaccctcaaccacttgcatttaaacaattccttcacatgattatcgctcaatcccccactttcccgccaaaagcgttatactatggataataaataaaaggagtgttttgacatgcaaaaaccaattaaagggtcatgtaccacggtcttagtcggcaaaaaagcttccatcgacggttcaaccatgatttctagaaatgatgatggccacgaagctttggatccacaacgctttgttgtggtcaatcctgaagaccaaccccggaattatcaagcggtgattagcggcgttcaaatccaattgcctgataacccaatgcgctatacctcaattcctaactcattattgacgaacgggatttggccagctgctgggattaacagtgaaaacatcacgatgtctgccacagaaacgattaccactaacccccggattcaagggcttgatccttttgtccctggtggcatcggtgaagaagatattgtgacattagtcttgccttacatccacagtgctcaagaaggggtcgaacgtttaggcgccctccttgaagaattcggcacatacgaaccaaacgggattgccttttctgacaaagacagtgtttggtggcttgaaacaatcggtggtcatcactgggctgctgttcgcatccctgatgatgcatacgtggttgcccctaaccggatgaacatcaatcatttcgactttgattcagccgacacgctttgctcagctgatttaaaaacattaattgatgacaaccacttaaatcctgactttgaaggctacaatctccgtcatattttcggcagtgcttcaatcaaagatacggtttataacaacccacggacatggtacggtcaacaatacttcaatcctgaaatcaaacaagatccaatggaccaagatttaccattcatctgccatgccaaccgcaagatttcaatcgaagacgtcaagttcgtcttgagcgctcactttgaaaatacagaatacgatccttacggtagcgcccctgaagatgttaaaactcgtttccggccaatcggaattaaccggaatcacaacgtgcatattttacaagtgcgcaacaacgtgcctgctgaaattgccggtattcaatggttagcttatggtgccaatacatttaacaccgtcgtgccattctacacgaatatcaacgacacaccagaatcatacaagaatgccacaggtatttttgacttgaacaacatgtactggttaagctgtacaaccgccttacttggcgatacagattacgacttctacgttgatatgcgtaacaccttcgaactcgaagcaatgagtgcctatcacgtgatccaaaacgaaaccgacaaggccttcactgatcaaaaagacgctgcagccttcttggaagccgctaataacaaattagccagcgaatcacttaaacgccaaacagccctacttggccaaatggtgatttcaggctcagaacacatgaaattacgctataacttgaacgactaatatttatttaattcaaaaaagagcggtctcagctattcgttagttgaaacgctcttttttgagttgtcctcttttttcagtagcgtataataaatactattactcaaaccacactaaggagtcatttatcttttgaaaccccaaaaattaaaactatcggattacttactcggctttggattcgtattattgatggtgggcattgccactgtcttgaacgatgttgagattattctacccgaaatcgcagccttaacaacggggctgtggatttatcacgaaccgggttggctcaatcaacccgccaagatattttggctgccatcgataaccgccatcgttgggtttggcattaatcggttgccgctcagttatgcagttaaaattagcttactactactcatcatgattgttttactttgtttatttcgctcaacactcgcaccatcgtttgcaacggggctgttaccgattatcgtcaacgccactgaactttcattcatcattgcaattttaggctttacgctcactttgatgttggtcgttagcctccgcaaattgcatctgcaacatccctatcatgccacgattaactatcgcgtcatgctggtttttctaatcattgcactcttatgggtgttagttgttagtttactcggccggccacagatggctgccattccgccggtacttgtcgtcttttttgaaattctacaaaaaccaatgtatccaggtaaaatggccatcaagcagatggttgcattaactggcgccgccacaatcggattcgtcgcttatagcttacttgattcacggttattggtaaccttaattgcactgccactagtttgggcattactctatctgctacaagtcagaattcccgccgcctacgccttccctttattggccattattctcccacaccaaatgtttcaaagtttgccgctcgtcactttactggcaactagttacttttttggggctgcttatttataccagcaatacattaagccgcgtctcatcagcagataacatgacggtttacgactaattttattagttgtaaaccgttttttagtggctttttgcacaagcaataatattgcagtttcgctgagaaataatatagttgagttgaccctgtcttatctctctgggcacaaagtgcaatgaaagaggctatttacatgacaaacaaactaacgactaatgagggccaaacgtgggcggataatcaacattcgcaaactgctggtcaacgcggtcccgttttaattcaggattattaattgctcgaaaaactcgcgcattttaatcgtgaacggattccagaacgggtcgtgcatgctaaaggcgccggtgctaaaggttacttccaactcactaaggatatgagcgcctacacaaaggcagccattttcagtggtgctggtaagaaaacaccaatgattgcgcgcttctcacaagtagctggtgaagccggctatcccgatacttatcgtgatgtgcgtggatttgcccttaagttctataccgaagaaggcaactatgacattgttggtaataatacgcccgttttctttgttaatgatcctctgaaattccctgatttcattcactcccaaaaacgagatccacgaacacacgcgagaagccaagacatgcagtgggatttctggtcactttcacctgaatcagtccatcaggtgacgattttaatgaatgatcgcgggattcccgctagttatcggatgatgcatggctacggtagtcatacctttaaatgggtgaatgctgctggtgagcagttctgggtaaaataccacttcaagacaaaccaaggcgtccataacttaagtaacgaactggctgccgaattggctggtaaagatacagattatctacaaaatgatttattcgatgcgattgaaacaggcgaccatccaagttggaccgttgccgttcaacttgttccttatgaagctggtttaaactatccgcaagatatctttgatgtgacgaaggtcatttcacaaaaggattaccccttaatcgaaatcggtcaaatggtactcgatgaaaatccaaccaacaactttgaggatatcgaagaattggctttctcacctgctaacttagttcctgggattgaagcttcccctgacaaactcttccagggacggttgttcggttataaagatgctgaacgttaccgtctaggtgccaactatgaacaattacctgttaaccggccaaaagtgcccgtgcataattacgaacgcgacgggatcatggcaaaaaaccaagagacaggcgtcaactatgaacctaatagtgaaaatggtccaaaagaagtcccatctgccaaaattcatggcgaccaacttagcggtcaaaccggtaactatccagccgatcccgattactattcagcagccgataagctttacaacttactaactgatgaagaacaagatcgactaatcgaaaacattcgcttaaatctcggccaagttacaaaacctgaaattcaaatccgcgaagtcaaacagttctaccaagcggatccagaatacggtcgccgagtcgcaacggcattaaatttagatttaaaccaatttgaacactaatctatacaaaaagaaggtatccggcccaccggataccttctttttatttatcttcttttggagaatcttgttttgctgcccattctttcttggtcatcaagtcagagacattcattttaatcttcgtcacgtttaaaccagtcatttgatgtactgatttagcgatgcgttcaattgtttgttcgaagatgtctggcgctgatttaccgtattccaagatggcatccaattcaatcgttacttcttggttatcaatatcagcgtcgacgccctttgtcgaatcttcttggtctctgaaacgatcagctaattgactcatcatcccgcctgataattctaagacgccatcgatgtcatgcaccgtttggcccgcaattttttcaatcacaccatccgagaagttcaattctttttcgattttttcggtatgttgatccattgtcttatccatcattttatccattggtttgtttggtttatccatcgttttcatcatcctttactatttttattgaacgcgtttttcagaatcacttttctttggattactgccttgttgttgccattctttcttagtcataatgtcactgacatggctgttaacttcgacaacactcaaaccggtcattgattcgacagcttcagtcactgcagctgttaatcgttcgaaaacatcccgtgcattccggccgtattccaaaataatggtcatgtcgattgcgacctgtttttcgccaacttccacactgatgcccttcgttggatcactatcgtttctaaaacgatccgcaatatcactgaagaaattaccgttcatcgataataagccatcaatgttttgcgctgtcttaccagcaattttggcgattacagcatcttcaaaagtcaatttgctattggccatcacttcatctaaatgtgcttgttctaccattttgtcacacctccgttatttatcctgcttcaagacccggttaacttgtgatctaaatccttctagatcttccttagaccctgttaaactagctgcaatgtagccgagtaaaccagcgatgataatcaagattaaactcataaatccaaaactaatccaaatggctgccaacactgccccaacaacaaagccccaataagaacgtctcatttgtctcacctcacatcactttttgcctgattacttagcggtgatagtttgacattcactgctttaatcggcatctcaaagattgtttgtaatgcttgctgtaccgtttctttaactgcccgtgcttgttgatcgagatcgttgcgatccactgcgaccgcttgaacgtcggcagtcacttttggatgtcggcctttaaacgtcgtatggactaacacttccttaacacggtgtttttcaataatagcttgtgtcactgttttttcaaccgctttgcgggaaagtgctagttcacctttatcggtcttgatgatcatttggcgttttttcggtggactgaataatgccaatagcagtaaatataagaaaattaagccgctaagcactcctaatccaagtccaaaattaccgacccattgttcgggtagccaactaagatgcataaattgcttattggattgttgtagtggatagattaatgtgataaaccacgctacctgacacaacccaagcaaactggctaaactgatcaccactttagttaatttattcatggtgtccgcccctttgtattaggattttctacgtgtgaataataatgaaacaacgaaaacgacaatcacggcaccgataatggatggaattaaggccatcccggcaagctgtggtccccagctgccaaacaatgattggcctagccaggcgccgactaacccaccgacgatattgccgatccaacctgcaggtaaatcacgacttgtcaatgcccccgcaatcaccccaattaaagcgccaataattaaaacccataaccaatgtaacataacaatcatcctttcttgtttccttaaaatatattgctagttctccataaatgtaacaaattcaactagcatccgtaaaacaatacgcttatcaatattattaaattatcgtaaatgcacttgtttaattaattgattcgccaccggtaacgccgtaaatttgaccggtaatatagcttgctgcgttgcttgctaaaaaaacatatagcggtgctaattccgccggttggccggctctttctagcaatgtattctgcccaaacttaggcaaagccccttccagttgtccttgagccaactgcaacggtgtccaaatcggacctggtgcaaccccgttgacccgaatacctttatccgctaattgttgcgctagattgatcgtaaaattcttgattgctgcttttgttgctgcataatctaacaaatgcggactcggattaaaggcttgcactgaagtggtcgtcagaatactgccgccagccggtaattgaggcaatgctgcttgcacaagcgcatacatcgcaaccacattaacgttaaaactatcttgaacttgttctattggtaattcggtaattgatggatgcgcaatttgttgagctgcgtttaagactaatgtgtcaagtgtgccaatttgctgctgcgcggtttccactacttggctagcaatctgtggtttccgaaaatcagctgggatcaatgcgattttacgccctgcatctcgcaccaattgagccacttcttgtgcatccacttcttcacctggcaaatattgcaatgcaatgtctgctccttctcgggcaaacgcaattgcaactgcgcgaccgataccagaatctcctccggtaatcagcactttacgatctagtaaccgttgtgcaccacggtagtgttcttcgccacaatctggcttgggatgcatttgatcttgcaatgccggactagcttgttcttgttcttgaaatggctctgtccgataaagtgttcgcggatcttttaaatctggtttacccatcttcttgttccctcttttccaattaatctagatacactgcttttaaatgttcaatgtcctgcgttgttaatcctaaggcctgttgtaaataggcttgagttgaaccataatcctcattgattatgcgctcagctgtgcttaagtaggactgatcaacactcatcaatgcatgcatactttttaaaaagccgcttgaggcatctttttgacgtagcgtcttaatgcgggctgcaacgtgttccctagatgctgtattcgataatagataatcatattggatcacatcttcaggtaccccgagtgcatttaataaataataagccgccattccggtacggtctttgccacctgtacagtgaaataaaactgcttgttgcggatcggcttcagtcaataatcgttcgaagaattggcgatacattccgattgaatagggatcttgcaccatttctcgatagacttggcgcatttgttgctgcccaccaagcggattattggtgtagcgctcataaagttccgcttcactcgccgtactttgcgtcgcatcttctttaaaaattggcaacgattcgtaagatgccgtcgtaatctttttatctggcgcttttttgcgctccattggtgaacgaaaatccacgacataggtgatatggtagctttccaagagcaccaattctctcttactaagattcgccagattccccgttctgaataatcgatgcggtttaatcgagcgaccatccagtgtttgatagccacctagttctctgaaattgtagccatttttaattggtaatgtgcgcgaaaccatcgactcatcctctctaatcaaccactttggctgctaggatcattgattatcatccaatttttgaagacacatttttaccgtcttgttactaaaaacacgaccacgatgatcaaattccaatggcccccagctctcaccgacgagggcctcaccgttattctctcttaaaattgcttcctccaaatcagtcataccttctagaaaacactttagattggctgattctttcttaatcaccaagcacaattctggggtcttgactgtactacgacctaacctaactttcctaattcggacttctttttgcataagcaaccttcctttcatgaaatctttaataacgctacaccatcaatataaaacaatcacatttattgatgcaacttttatgattacgttttgttattgttagcataatcatttacctttacaaagattgttgaagttgtttaaataaagacacaacacctaaaaggagatggttattatcaacgctattaatatcatgtttgccgcagatgaaaactatggtgatcaacttttaatcgccgtaaagtcggctctaacccatatttcgcccaaaactactattaatttttttattctcgataatgaactcactccgcaaacgaaacacgctgtttccaagcgcgttccacgccccaatcaagttgagtttattgcacttaataagcagctttttgaaaactgtcctgaaagcaaccatatcaacaaaacggcttactaccgcattttagcgccaactcttttgttgcgaaaaaaaatcgaacgtgtcttatatttagatgtcgatatcctcgtacaaactgatctcacgccgctatacaatacgcctttgggcacaaatatcgtgggtgccgtgattgatcctggacaagcactcacactgcgacggctcggcatcaccccaccacaatcgaataacatctacttcaattcaggggtcatgctaattgatacggttcggtggaatcatgcatccatcacagagcggactttccacttcatcaatcatcatgcggatcgcttacaattccatgatcaagatgcgctaaatgccactttggttggtaaagtgaaactactccatcctaaatggaacgtacaaaactcattgctctttagaaaacatgcgcctatcaacactgaatatgcccatttatttgatgaagcaatcgccaacccggcaattgttcacttcacaacacacgagaaaccttggaacactctaaaaagtcaccccttcttaaaccaatatcaaaaggaactcaaacaattacatgcgcaacaatccgatataatcaacattgtatcggctgtcaattccgatttcatcgaaacgctggcaattctatacgcctcaattcttaatcacaatgactcacatcgacactatgctttttacgtcttagaagaccacctcaccgcacgagataaagcagtcttacagcatgttgtggctcgatttgatgccgacttgacctttgcagaggtcaacgaatctttactggccaatactgttgaaagtgatcggatcttgaaaacggcgtactatcggattctaattcccgacgtgttccctcacctcgatcgtgcactctacatcgattgcgatgcgctatgcctcacagatttagcccggctatgggatatcgacttaggccaatccttcctcgctgcagtagaagatgctgggttccacgaacgcttagaaaaaatggctatcgattaccaaagtccgcgttactttaactccggtgtgatgttactcaatctcaaaaaatggcgtcaacacaatattgtcagccgtgtactcgacttcatcaatcagcaccctgagaaattacgcttccacgatcaagatgctttaaatgcaattttgcatgatcggtggattcaccttcaccctatgtggaatgcccaaacaaacattttgatgaacaccatcacaccaccaactgaacacctcaaaaaacaattcttagaaacccaaaaagaacctgcgcttgttcacttctgtggtcacgaaaagccatggcatgcctcatcttcccatccattcacaccacaatatcgttactaccggcaacggttcttaaaacaaaaaaagcggctcgttcccttcgccaatcgccgttccctttctcaacaaggataactacaaaaaaagcgggtgcttagacaaatttatttttgtctaagcacccgcttttttaattgctaaaaattatctttttattgaccgactaagccatcatgaatcttatctaggttccacttcatcatcgtatagtaagtgtcaccttgcttccctctttgcgcgagtgagtctgtaaaagttttcgcataaattggtaacccagtttcctgagcaactttttccattgatttcggcgaaacagaactctcaacaaacagatgcttaacatctgaatctgcaatttttgcaagaaccgtcttcatctgttcaggtgtgccttgcgactcagtattaatttcccaaatgtaaaccggtgtgacctgataggccttaccaaaatacttaaaggcgccttctgaagtcaccaagacccgctgattagctggaatatcggcgaatttagtttgcgcatcagtatgcaatttgcgcaaacgtgcagtgtagcgatccgcatttttgcggtaatcatcagcgtgcgctggatctttggtctgcagcgctttcgtaatgttttcaacgtattgaataccgttcgccaaatccaaccatgcgtgtggatcgggttctgtttggttagttgtcaaatgttgcacctgaattcctttgctagcagcgaaaacatccttttcgaattgcttatgcgcgatcttaacaagttttctaaaccaaccattgccacccgtttcgagatttaacccgttgtgaaaaatcacatccgcatcagtcgcttttgaaatatccgtcggttgcggttcatattcatgcgggtcagttccccgtttcacaatactgtaaagttcaatgtggtcttgaccaacattatggaccatatcttcaagaatcgaattcgtggtcactacacgtaatttagtctgctggttcgtttgttgttgtttagattgggcgcggtgctggatgaaaccatacacaccacccaccaaaccaaaaactgcaattaacgtcacaatcatttttttcatgctggtcgtcctcctttgcgccacttaaggaaaccttgcttaggcgcgcagatgaatgaaatggcaaagagcacggctgccatcagaacaatcgccggaccagatgcccagttcaatgtgtaactgaagtacaatccactgattgctgacacagcaccaatcccagccgataagaagagcatcgtcactaagcgatccgtccataaaaaggcggtggctgctggggtaatcaacatcgcaacgaccaaaataatcccgaccgtttgtagggctgaaaccgtgactaaggttagcaccaacattaaaccgtaatgtagcacctgcgtttttaacccatatgttttcgcataggtttcatcaaacgaggtaatcaataattctttgtagaagaatgagacgaataagatcactaagcctaagacaatcgccgtactcataatgtcgctatcactgacggcgagaatgttcccgaataaaatatgatgtaagttggttgcactttcggccattgaaatcaggataaacccaagcgcataaaaggcactaaagacgaccccaatcgaagtatccgtcttaattttactatgtgttgcgacaaagccgattaagactgccgctaaaataccaaatacagatgcgccaaccagcacattaattcccaacatgtacgccactgcgacacccggtaacaccgcatgtgaaatcgcgtcacccatcaacgacatcccgcgcaaaatgatgaaactcccgacaatgccagacatgatgccgaccattacggcggtcagcaacgcactctgcaagaattcataacgacccaacgcactaataaaagctggaatactcgtcattttgccacctcctgtgcatcaaacaagacagcggataagtccgcactaaaagcacgctcaatgttttgcgcattataaactttttcagttggtccataatcgacgatgccgtggttcatcaccactaaatcatcgaaatattgcgatactttattcaaatcgtgatgaatgacaatgattgttttacccgcatcacgccactgtttcatgattgccatgatcgcggtctcactctgtaaatcaatcccaacaaacggttcatctaaaataataatatccgcttcttggacgatggcgcgtgcaacgaaaactcgctgtaattgtccacctgacaactggccaatttggcgttgcgcaaattcgctgagcgatacttgttcaagtgccgcgcgactggcttgttttgcctttttacccggatcgcggaataagcctaacttgccatacgtgcccgttagcaccacgtcaaaaacgttaattggaaaatttaaatccaaatctttacgctgttcaacgtatgcgacttgcttctggactgcgcgcattggtcgatcttgatataaaactgagccttgccgtgccttaaccaaccctaatattgctttaatcagagttgatttgcctgcaccgtttggtccaatgatgccagtgattttgcctgcgtcaaactgaacggcaacatcagtaaatactggtgtgtcatcgtaagcaacggtgaggttcttaactgataacataaagagcctccattcttttaggtaaacctaacttttctcactacagcatacatgattttaatggaattaacaaatattttagtttaggctaacttttttagttatgctgtggaacaatggcttaggatgtttcacgtaaaacattttactaacagcctattagatacaaccttttattactaacctttattttccataatcatttaatttactactggtaacaacctctaaccaaaagacatctaacctattagccataaaagtctaataggctagatgtcttttttaaaattccacatacaccgttacaaatttagcatgtttctgcgttggtacctttatcgtattgctatacacttctaaagcccctattgtttcttcttttaaccgtttattttctttaatcagagcacgttcatttgatgataacactttagtgttgttaggatcagcttgtttaatccacttagtgaccgttgaaacactgacgttgtattctttagccagtgagttggccgaacggccagtctgacttaagctaacaatcgattctttaaattcatttgaatatttaattgccataataaaaagctcctttatgatgtattatatcgaacagtttgtccgtaattccatcataggagccttgtgatgtttaatgacacggcctcaacgttcaaacaaatcgatattgattcttatcaagaaattgatcatttaaatcaatttttagctgaaaagaaggctcattacacaacattaccagcgaattcaacgggcactctattaagcgaaatgttcttctttttgctcgactacaatccccaaatcaaacccttaaaaattaatatccaatacactaaaaatttctatgcagcgacgatgattaccaaaaatctacaaaatgtgttcaggtcttcaattgtgttcactgattagatcgaagacgcagacctcatcatctctgatcactacgaacatgacgagtctttaaacggacaattcttcttattcagaaataatttcgaaccagacgattgatccctattactgaagaacgtattagcgtatatttatacgaattcttttcataaacgactgaattaaaaaccaccgtactgctaaacagtacggtggtttttgcgttattgattttcaagttgttcttgcaaccattccagattaacttcatgatgccgtttagaattagtcatcatcttgataaacatcggttgcaagtcagccggattggctagtgccgcgtcaatcgcacggattttagcctgtgtctgttcgatttggctttttaacagcttatccatctgttccggtgtcacttgatccgtgaataatagtggtgtgtagaacggaaacgtaatcggcttattctggcgaccataatgggcaaattgttgctcaaaagccgttatgccagcggccgttaattgatagcgattcttttcccgcttatcgggcacgtcgtccgcgactttttcgatcagtgccttttctgccagctgctgcaagttatagtaaaacgagcccttcgtgaagttcacgaaaaaagcgtagtattggctttccatgtcagccaataattcgtaaccatacgcgcccggctttttctttagtaatcccagaattaaaaattgaatcatttactagtctccttgcccgttagctgtgcaataaagtcggcataactcatttgaccaaatgcaaaatcacgactcaatcggtacatcttttcctgctgtgattctgggcgttgatagagttggtctagttgaaccgcttcatctgcaaggacgtcaggaacatcttgatgctgttcgaaagcttggaaataacgaatcccaaaacgccgttgcgaggccgcgtcaatgtgaatcccatctgggttagccgttaattcggcagcgttgaccaaataactgtgtggatcttgcgcgacaacttgcgccatttcgcgattaatttcgttaaattccgtggcgctcgcgccgaaccctactttgcctaaaaaggctggcaattgacccgcaatgattggtaaatcaggttggcccaatgctgcacgtaaatgattgaagaccgccgtcaacttggccgcatacgtttgatagccaccatttaaactgtcactttcaccttgatgccataacaccccgattagctcactactttcttgtgcaaatttcgcctcagtaatcgcgtgacgcatcaaaagttcgtcgctcgcccactcatcgatggtgctcccaccttccgcgcaggggattaaccccaattcttcatcaggatgagcttgcacccacgccgcagcaaatgacgcagccggcccaacacccgcaacctcccgatcaaaatgaattggttcggccatcatttgccagcgcccattgcgcagcatcttcacgcgctcgtgccgcaatcccggcacatcttgaataaatccccgcccagccatattcgactgaccgactaataaaattgacttcatcataaaaatcctcctgaaactgatttttatagtatagtctaattagactatgaatgcaaaaagaaaccacaacttaattctaaattgtggtttcttcttaatccttcgtcaaattcaaatacaaactatattgcactggtttttcaagaattaaattcattgttacgactggatcaattttaccatctttaacaaccattgattcttgacgtaatgatttctgatcaatatcaacaagccctaaatagtagaaatcaatcccttcatcatcacttttcttcacaaatagtggcattttcaattcaccagacgcattcccttgaaccattgtttggacctctggtgactctattttccggggatgacgcgtgaacatacgcatcgtctgactattcaaaaactcatcttcatatttgatgccgtcatcgatatcttgcgatttcgcgtaagtaataaatagcggacaagttccataagccgttttgtagccataaattgttgacgtctggtctttttcccaacctaataaacgacaagcatccttacgggtatatttcttaccaatcgttaatggcactgtttgatcgtaaccatctgccttgaatagacctgtcgccaaaacatcatccacaagtaatttgaaaaacgaatttgtttgataagctgttttaatccgcccgtttagtcgatattgattattgtccaatgttacataggcatctcgcccatacttatcttgatcagccgctttaaaaaaactcaaactcaggattaatagcatcgaatccaatgtcttctgatccactctagcatttacttgctcgagggcctttttgaagtcaccaactgataccacaccatctttttcaaacaacaacttcaataataatagctcgtgaattcgcatcccattcaatagttctttagataacattcttaaaaccatatcttcgtcaatagatagatggacgtcctctttcatcttcaacaagaactggtaatagttgtcgtatttagcaaccagaactgagccatcaatcgaaccatgcgttgtaaaatcaaacaacaacggtactctgccaagacgtttcttcaaatcttgataatcatcgcgcaactgtttcaattcagtcaaattactattattaatcgaatcgtaaacccgttgtttagcaacttcggtaaaattaatcgtcgacatcccgataatttggtccgtactcaacttactacgtagactatttttattccgtgaatggtcacctgttaaagcaatcggaatcaaatagttattcttgtagtttccgataaaatcaatcaccgtcacaaaatctttacgcggaaacttccgtaaaccccggcccagttgctggataaagataatactggattgcgtattccgcaacattaccacttgattgatacaaggaatgtcgatcccttcattgaaaatatcaaccgtcacaatatattgatacttaccagcttcaaagtcacgaatgacttgttctcgataatcaacactatcttcgccagtcaaagcaactgaaggatagcctttagcggtcataatccgcgccacttctttggcttcatctttccggctacaaaaaattaagccatggacctgatcacctgcataaccataatagttcaactgctgttcaacataatccattcgttcagaggaaaccaaattctgtaatggcgtcttctcctcaccaatttcgccgtttaattcgtaatctgttacaccaatataatgaaatggtgctaacatgtcttcttccagagcatcttgaaggcgaatttcgtaggctaaattgtaatcgaacaactcataaatattaaaatcatccgtccgttctggggttgccgtcattcctaataaaaattgtggcttaaagtaatcaatcacccgatgataactgctggcacctgacttgtgcgcttcatcgatcatgagatagtcgaattcttcagggtcaaactgcgacaatgtattttccttagctaacgtctgaatcgtcgcaaataaatatcgcgcatcccgctggttttcattaccagacaagatcccgtattccgaccaatcgccacctagtacttgatggaaactggctttggccttcttcaaaatttgttcacgatgcacaataaataagaacttcttcggattcacacgttggacatcaaacgcacccaaataagtcttcccagtcccagttgccgaaacaattaatgctttttgatgaccttcatgtcgtaggaaattcaacgacttcaatgcatccttttgcatatgattaggcgtaatcacagtgtaatccgcggactcttcagctatagcttcaatcggttcatttttctgccgattaaaaacaatcgtttgataatcagcttcataaccagcgatccaggctggcgttaatgcttctgcacgttgccattgctgttcgacctcattgataacctggtcagttaacgccgcattttcatacgaagtgatccttaagttccactcataattacgaatcaacgccgtttcagttaagttcgagctcccaataatcatcgattggtattcacccttgtcaaagatgtaccctttagcatggaatgaatcagattgttttaaaatccgcacttcaagattcgggattttcaacagttctttaaacaccttgggattattaaagcctaaataattagacgtcaaaatccggcccgtgacaccttttaaggcaaggtccgctaatttcggtttcaacatcgttaagaccgcttcagtaatgaaagccacggcaaaagtgaagcgctgacaagtcatcagttcttcatccaaatgcgtcttaacatggtcttctgacgtgttaaataataacttcggcaggtattcatcctgagaaatgtagcgctctttatcaaccaatcccgctaaagctgaattttgtaattcagtctgtaaatccgtcataactactccctacttgaacgttaattgactcaaatcttgtttttgaatggcttgcatagctgccacatctgccggtgcccaggttaattggtccaattcagattgacgacaccatttcatctggctatgcgccactagtccaaaactttcctttgtgaactgcgcataataaaccgttaaatgaacgttgccaaaatcgtattggtgcacatcagttacaactgctggcccaaccaaaatatcagcacccaactcttcttttagttcccgcaccaaagcagcttccggcgcctcatccagttcgatcttcccacccggaaattcccataaatctccaagaatccgatcagtggcccgtttggtacatagaatttggttatctttgatgattgcagcaccaacgacatagatatctttcatgtagaacacccccgtaaatttaagcagactcttcattatccttcaataaatcacattttaaaatattaaacaggcaatcaatagattcttttaaattctcatcagaaagatcattcattttatcttctaacacctcaggatggtctatctcatttctaacaacatatggtaatgtcctaaattctttctgtttccattctccatttatacgaggcacaaatgccacatcacaaggcaccccataatatgagtttaaatacttatcgaaggcgtttaacgtatgctttccatccgtattttctatccatttaagttgtagtgtagtaaataaatgttgatgcagatcttgtgtcggcacaccaaatgctttatacgttacctcactcattgaggggtttttaaaatataattgttccattgtactgacctttttagagagatcattctttataatatccacattatctatttcatttctaaaatgcctaagtatatatggggaatgagttgtaatgaatacctggttatttggtgttaattttcttaatgaatccatgagcttatcttgtgctttaggatgcaggtatatttcaggttcatctatcaaaaactgcattcctagtaaagtagcttgccttttgcttgtgcgttccgcgactaattgaataatggccaaagctaatgctcgctgcattccatttcctttattagacgcatccgtcctcaatccattttcctcgatatcaatagttccttttttaaataaatcagtagcagcgggaaaattaaatttaaaatgaacttttgaagaaccaaactgttcagataatctatttcctaattcctcttccgtactacccaaatacttatttacaccatctttcccaaaagcagcattatgagcatcctttaacgctttaaactcctgactttcaataaaatcatttgttagagagctaattaacttacccgtaatttttgtagttccaaaatcttgtaaatcttcattatgtaaatctgcatatataaattgtggattaaataaggccgtcgcaacattagctacacccacagggttttcaaactgcgctgggacatcctccttagtttgctcattccatagtctaaccgtttttatattcatattaacttttttattaccttgcttaatgttagtttctttagaagttttcaataatattaattcatttttagatgtcctataatcttcatatttagctaggctgcccttaagttcaccaacatttgctaagcaaatttcaaccgatacagattcactttcatatcctttagagatataatcactttttttcacagtagatatcataaaactaaatgcatcaaatattgtagttttccctgcattattattaccaaccaaataattaacacctggtttaaaatgaattatatgttcccccatgaaggacttaaaattagttagtttaatagatttaatatacataattactcccttaaatagttcatttattctgaatactcactaaatacattaaatacttcatttggtacctcaatcattaatagatccaatttatcttctctcactattgatggaagtttataatcacccttcacccaactggaattccaaatagaatattctgaatccatcacagttttacatattttttcttgatatttaacttcactatttgaagttaatgaaagtctctgcagccaaatttgtaggaaattcatgtctggtgtcccctcaagtttccttgatatccgctggacaatctcctctatttctccatcaatattaattaattcgattgtatcagattataatttgcttattttagatgaacctacaaactatttggatttaccatcaattgaagtcgtaaaaagtgtattaaaagaatatgaaggaacaataatatttgccagccatgatgaggcgttcattaatgaactgagtacggaactattcatcattgataataaaaagctacaaggttatcgtggaaatctagaggaattcaagaataaaacggatgcaaatattgaacagctccaacaggaaattgaacaaatccagttaagtcaagcaaaacttcttatggaaaatgaaacaaatcctagaaaaattgaaaagataaagaagagatatgaagagatgactagggtataaaaggagaataattattttttgatttaatttaaaatgagaaaagtaacaaagagtccattttgattaagttttttacttcaataatcggacgcctttctttaataagaaggcgtctttttctaatcaatcagtttctggagcaacgcattaatggattggagttatattaggtgtagaaaagattgtgaaggattctacttaaactattgggtgcgtttctgcaataagacagggacgcttattccactatttggaaggtttatttaattagcaggataatggttttgtcttaaagaataatcttatttaagaatacaaggaggtgctaaaatgaatagaaaaggatggatttgtttaggagttgctggttgtcttgctgtatggtctatttccctttttggaagtggttacggatattataattcacaggttggtcaatggttgtatgtaaagtttatgggggatattgtaaaagttacaaccacagaagagttgaataaatatgcttacttatatatgggattaagtattatccctgcatttcttgccctttacctttaccgaaagtttttaaaaattgttccagtgaaacaagaagtataagtattttatatttaactatcaggggcaagagttcaaaatcagagctgtcataagtggcggctcttttcttatactatggactcgattagttcttttttcttctcccctatatataaaaatttattctacgggaatactactaaaaattctggaggtgtttccatgtttatatttcgaaaaattgttttaggagctatttttttgttaactctatttactttaggacagtcagctttagcgaatcaaaattatgaggatgttaatcagttttacaaaaacacggttgataaaaaagaatatgaggaatacagtgactcaaaaacgaaagttcgagaattagtgattgtaaggaaactccctgatttaattgatacaatcagttggggtgatgaaaaaggaaagcaacgattaaaagaagaagtagtctctgatgcaaaggatataaattctgaaggtcttgtatattttttcttttcattaaaagacacgggtaataaggtttcttataaatatgctttatttaacgctgatacaaagaaaccaatttcaactgccgaaagtgactgggtaaaacaaaaatagtatttaagtttttttatttactgcacaggcgttgattctacaaggattaacgtcttttttcagcgatttgttattgaagtaacgggtgctatagtgacagataaaatttattgattttatgattgaaatcatattttagttactccattatagggtgcgattatgcaataatacttggatttaattaactcgattgttagcactttttagtgcagtgaagtatttcaattaaaaaacacataacctcgttctaaaaccagaacggggttatgtgtttttgagttaatcatcaaatatggtggtctctttaaagacatgtagtcaaagtgaaataattgattttataatactttttacacttaactattgataagacctcacgccgtcaacgcaagatattgccttcactaaacgaattgtcgcctgtggtgaactgatgggcattgtatgcctagaccacttgattattggaagccagcagtatctcagtttgcgagaagagggttacttagtggagtaaaagagaacgcttttttctttaagaatctgttaattttaggcgagacctgtcaaattttctgaaaatccgttaacatagtagttacattgcgttttttattacgtaaaattatgatataatgccaatgactataaaaacgtttggtaactgaaggagagaaaaatagtgttcggattagggactagaaatatcggtattgacttaggtaccgcaaacacactcgtatacatggacggtaaagacattgtcttgagagaaccctctgttgtcgctaaaaatacacaaactggtgacgtgattgctgttggctcagaagcccgcgacatgatcggccggacacctggtagtattgtggcaattcgcccaatgaaagatggcgtgatcgcagattacgatacaactgctgccatgcttaaatattttatcgaaaaatcattaggtcgctcatctagcaagccatttgtaatggtctgcgtaccaagtggtgtgactgaagttgaaaaacgtgctgtaatcgatgcaactaaggtggcaggcgctcgtgatgcatacgtcattgaagaaccatttgcagctgcaattggtgccggtcttcctgttatggatccaactggtagcatggtcgttgatatcggtggcgggacaacagacgttgccacaatctcattaggtgggattgtttcaagccgttcaattcgaatggctggcgacaagttagatgacgcgatcatttcttacatccgtcaaaacaataacttgttgattggtgaaagaacagccgaacaaatcaaattcgaaatcgcttcagcatcaccagaacgcgctaaggaaattgaagcgatgagcattcgtggtcgcgatttagtaactgggctacctaagacagtggacattcaagctgttgatattgctgaagccatcaaagaagttgtcacagccattatcgaagccatcaaagaaacacttgaagaaacatcaccagaaattgcagccgacgtgattgatcacgggattgtcttaactggtggcggcgcattgttgaaacacttaccagaagtgatttcagatgctactaaagtgccagtctttatcgctcaagatcctttagactgtgttgcagtcggaactggcgaatcattaaagaatatcgatgttatgaagaaaaattaatcgttcagtagaagtgggacaagaagcggtcagcgttgacgtagcgcctaaattagtgacagattcgggttgtgaatcgattgctataggaaggactactgatcaccggtttttgtcccacctttacgatattaaggatggatggtggcgaagaaaccatgcaaaaatttttttcaaataagaagttaattgtgttattaatcatgctaatcgtctgcatgggcttcatcgcaatgtcagttggtttacgcaataacaaaaagagtccgagtttcgtacgccaatttggcaacgacgtaacgggcatcactaaccaagtcattagcgtgccggccaatgggattggtcgaggggtagatgccttaacagacttgattaatacgtaccaggaaaacaaagaacttaaagcacaacttgatgatttagctcaaaccaaggttcaaacccaaaccctcaaagaagaaaatgcaagtttgaaaaaggaactcggcttaaaaggcaccttgacggattatacaaccgttaatgcgtctgttttatcccggaatcctgataattggcaaaatgcattggttatcaataaaggggccttagctggacttaaaaaagatatgcccgtcatgtctgagtctgggattattggacggattgttgaagtcaacaagactaattcgaaggttgaactcgtttcaagtacggatcaaagtagtaacggatttgctgctgtggtgaataccaaagatggtaagcaagttaatgggatcatgtccggttacaatgctgaccggaaacaattgaagctcgggcagattaagaccgatgcggcaatcgaaaaaggtgacaaagtgatcacgtctggtttaggtggattaacccctaaaggcttgtaccttggtaaggtagcagcagttaagaaagacgattttgggttagcattaactgtttatgtgaccccagctgctgatttaaacaatttaaccgttgtgactgtcatcaaacgaacgattgaaggtgagtagcatgggtgtgacgcgattacaacggcgctatttattaccaatctacttactcgttgcgttttatttggatggcgccatcagtcatttatgtgaacaatggttatatacaccagatcatacgttgattagccggctatttatgctcgtattagtggtaacggcctttgttttaccagaggaacgccaacttacgtggtatgcagcagggattggtcttttatacgatttgtattatacggggatgatcgggatgtacacttttgcagtgccgctcattatctatacagtgcgttatttaaaacaatatttacctgactcagcctttttcattgggctaatcgatgtcttgtgtttaacattactcgagagtacgatttacatcatgaatcgcttgattggttatgcaacagtaacaccagtcgaatttattagtaatgttttagcaccgacaattgcattaaatttggtttattttgtctttttgtatttgcctttaaaatatttattgctaaaattaaaatcagaacggtaaggggtttgatttttctatggatgcagtcacgttacgaggacgcaaagaaggttttgaattaaacattgatgcgggtgcggatttcgatcaagcattagttgcactagcggaattattgaataagattcgcttagagcaaccgcagttggggagcaatcagattgaactggagctgaccactggtagacgcttgttgaatgatgcgcaaaagcaagcactggcgaccgtctttgagcagtttccagaatttaatgggacaagcattcaatcggaagtcatgacgattgaacaggctgagattgatcggcgggaaaatagtattcacgttgaacccaatgttttacgaagcggccaagaggtcaattatgttggcgatgtcttattcgtcggtaatttacaccaaggcgcaatgttaaaagcaacgggcagtatcttcgtacttggtgaagttgccgggattgtgcacgctgggtttccagataatgcagaagcagttgttgcaggtgatttatcacacgcgttacaattgcggatagcagacgcagttgagattctcgatcaccagaagacgccatttacggcacagagtgtaagtttcatcaatgatttacatgttatcgactacggtgagttaacggatttgaaacagattaatccaaaattatatcgtaaaatgaaggagcaataaaaatgggaacagctttggttattacatccggtaaaggcggcgttggtaaaacaacatcaagcgccaatattgggacggcgcttgcgcttttagataagaaggtttgcttgttagatttagacattggtctgcgtaatttagatgttgtcttaggattgagcaaccgcattatttatgatatcgtggatgtcgcccaaggccgtgctaagttgcaccaagcactgattaaagataaacgttttgatgaaaaaatttacttattgccagccgctcaaaatgcggataaagaagcgttaacgcctgatgaagtcaccgccatcgtgaatgaattaaaagaagaattcgattttgtgattcttgattgtcctgctgggattgaatctggctttaaaaatgcgattgccggtgcagacggtgcaattgtggttgcaactcccgaaatttcttctgttagtgatgctgaccgcgttgtcggcttgctagaagaagaagaaatgcggattgcgccacgcttagtaattaaccggattcggcgtcatatgatgaatgaaggcgaaacgatggatgttgatgaaattaccaaacatctttcaatttcattgttaggcattatttttgatgatgatgcggttatcaagacgtccaatgccggcgaaccaattgtgatggatccgaaaaacccagcaagccaaggctatcggaatattgcccgtcgtttactaggcgaaacagttccattgatgactttgaaacaacacaaggttggtttctgggcccgtcttttcggtaagcaataaacattaaccattgacttttgatgcgatattgaatagaatgaataacaatacattaaacgttgaacggtccaaattaattcttgaggttcagagagctgatgcgtggtggaagtcggcccttgagattaatggcacaaccgtgagtttgatcatcgaataaagatgatccgttagcccgttatcgctgtagttttagaaactacataagtttaagctgcgtgagcagtttattaaactgaggtggcaccgcgataaattcgtcctcttggagaaatccaggggactttttttattggtctaaaactaactgagttgtttgttgtgaggcaaacaaaaatttgaggtggcaccgcgaaatttagccctctttgtgttttaaacgcaaagagggctttttattttggacaaatgagaggagtctgtcatgattgactatagtttatcgattttaccagcattattaagtggggcgcagatgacgttggctgtttttggcctaacgattattggcgcgattccacttggtttattattaagtttagggttattagctaagtttaaaccactgcattatcttttagatttatatgtgtggctgatgcgtgggacaccgttattattacaactaatttttgtattttatggtttacccgtggtcggaattgtttttaaccggttcgatgctgctttaatcgcttttattttgaattatgctgcgtattttgccgaaattttccggggcggctttcaagccgttgataatggtcagatcgaagcagctgaggtcttaggcttaacttacccacaaacaatcgctaaaattatcgtgccccaaacggttaaaattgtcttaccgtctgtcggtaacgaagtgatcaacttgattaaagattcatcgttagtgtatgttatcggcattggggatttactgcgggctggcaatgtcgcaagtgcgcgtgatgtcaatctcttaccacttttgctagtcgggattatttatttattgttaacagccatttgtacatgggcattacggcgtttggaacgctattatcgttattatcgctaaggaggcggcaacatgtttcaattagaaaatatcaatcaatccttcaaaggtcggcaaattttgaacgacttaaatttatcagttgaatcagggagtattttagcgattgtcggtccaagtggtgctggcaaatcaactttattacggttaatgagtgggcttgatcaacccgatagcggacggtttattattgatggtaaaccttacgaacctagtaatcgggaacaaggggcgcgcattggcgttgtcttccaagattttcggttattcccacatctttctgtccttgagaatgtgacgctggcacccatcatggtcaaaaaacaacccgctaaaaaggctaaagcagatggcgcaaaattattacagcaactagggttaagtgctcaggcgacggcttatccgttccaactatcaggcggtcaacgtcaacgagtcgcaattgcccgcgcattggcgatgcaaccggagattctctgttatgacgaaccaaccagcgcacttgatccatcgttagtggcaagtgtcgcacaactcattttagatttgaaacagcagggaatgacacaaattgttgtcacccatgatattcaatttgccaaccagattgctgatcaaatctttgaattacaaccaaacggggttcaacaaaatgatgaagcttaaaaaaacagcattaatagcggctttattgatgagcatgattggtttagcagggtgcgcacaacgcaatcagcaggctgatcaatgggcaacgattcaaaaacgccaaaaaatagtcgtcgggattgatgatagttttgtgccaatgacttaccgtgagaagaatggtcaattaaccggttttgatgttgatttggcacgggcgatttttaaggggagtggcattcgggttgactttcagtcgattgattgggatatgaaagaaacggaattgaataatcaaacgattgatttaatttggagtggttattctaaaacggcgcaacgggcaaaacgggttgcgtttagtgacccgtatctgactaatcggcaaatgattgtgtcgctcaagaaacaccctgttaatcaaatggctgatttaaccaaccaaccattaggcgttcaaacgggctcatctgggatggaacaactagagcgttatcctaaacgattacagcaaagaattgccaaccatgcaccaatcctatatgatacttataacaatgcgtttatcgacttacaggccgatcggattaaggggctcttaattgatgaagtctacgcgcaatttgaaattaagtcacgccacaacggcagcgattttcaagccatcgacagtccttttgcagcagaacagtttgctgttgggatgcgtccgcaagatcaacaattacgtcaatttatcaaccgacgttatcgggtcttacaagcaaatggtacgctagccaaattaaaagcaaagtggtttaaagaataggatgaatgaagaatgacagcaatcattatctgggggatagcactgatttggattgcaaatacaatcggggctgttatcaccgtatttcgccaacaacgtgatattgcagcaacctgggcctggctcttggtattgattttcttaccaattatcggctttgttttgtatctatttttcggaaaaaaattaccggaagatcatatggtcgatttgaaaacacaagaacggctcggcattgatgccttggtgacctcccaaaaagcagcgttacgccaagcgcagaagcaacacacgttaccgccagaaacgcagagcttaatcaacctcttcttagtatcaaataccgcggttgtgacccaggaaaacaatgtaacaattttaacggatttgaaggcggcgtatcaacagttgttaacggatgtcaatcgggcgcaagatcatatccatcttgaatactatgctttttatgacaacgaacacgggcgtcaactggtcaatctattggcttacaaggcactgcggggggtaaaagtgcgtgtgatgtatgatgcatttgggtcgcaacatttatcccggcagttctttaagccattggaagcagccggcggccaagttgtcccgttttttagttctcggttccggttcgttaatctacgctttaactttcgtaaccaccggcaattggcagtaattgatggcaataccgcctaccttggcgattttaaccagaataatcatcacgttaatattcctgcacgagatacgcggattcggattaccggcgatggtgtgttatcgtttcaagctcgctttttcatggactggaatgcggctacgcgtcaggaaaaggtgtattacagtccgcaatattttcctaactcagatgaacacgggcagactagcatgcaactggtatcaagtggacctgatcgagaactcgatgagattaagttaggctttttgaagatgattgctgccgctaaaaaacggctgtggattcagaccccatattttattccggatgattctgtattggcggcgttagtgttagccattaattctggggtgactgtgaagatcatgatggccaaacgtgcaaaacataaaatgattcatcatgcgagtttgtattacgctagacaaatcgtgaaggcgggcggtcagatttacttctctgaatcaaccggatttaaatcacgcgtaatgttagttgatgggcaactagcagcggttgggacggctaatttagatattcgcagttttagattgaattttgaaacgaccgcttttttatatgatgcacaactcgcaactgaacttgaacaatcttttacggctgatttaaaagaatgcttaccatttacgaaacaacggatacaagagcaaagcaatcaagaacgttggtcacaggacttggcgcgtttgtttgccccaattatgtaaaaaagaaccgtcagatttaatctgacggttcttttttagttatttgaaatagtcggttaagccggtataaacggcatcagcgactttagcttggtaattagcactgctaatataactaaagtctttatcagaattgatgtagccgagttctaagagaacagcaggccgttgattatcgcgaaggacttgataattgccgtattcaatgccgcgattgttaagcggtaatgtcttagtctgattgttgatggccttcgcgaggctcatatccttactgcttgaatagtagtaggttgttgtcccggatgcttcattggcttcattgcttgaatcaaaatgaacgctgataaaggcatcagcctttaatttattggcaagagcaggtcgcggttcgagatcgacaaaactatcatttgaacgcgttagcacgacgttagcaccagccgcttttaattttttagcaatcgcatcgacggtcgctaatgtgtagtctttttcatacttagacttagttgaaagtgcaccgacgtcggtgccaccatgaccagcatctaaaacaatggtggcttcagaaagggaagtagcgctagtcttaacaacttcattcttctcagaaggagtgacaacccaacttgcgacgtaaccggtattaccatcggcatctttaacttgataccaagtaccactcttattgatataagttagcttggtattggccgggtagctttgggtatattgatacgaaacatcaggaccagtgcgtagcttggaattatccagttgggtggtcactgatttaatcgcggagctacttgtatcagtatccgtagactcagattcagcggttgtcgttttttgaacagtcgccggagcttggtcggaaacttcgattaaatcactttgtacccaaccaactgctgagttgtatttaatctggctccaaccgttttgttggtataagactgtaatttcgtcaccttgatttaacttaccgagtagttgactatcggcactactgctttggcggacattggcaaaactgttggtgaccttagcgactcggtttgaagtggcactgacttcggtgttatcgactaaccagctagcaacccagccaatcttatcaccacttaagcgcacttggtaccaattattcttttgtgagataacattcattgtttcgcctttattggcttgactcatgacatcataagataatccagggccttggcgaacgtttacgacgttcgctttaatcgtaatttgttggtaagcagccagcgcgtgggtcacaaagagaccgacaaaaacgagtaatgctaatataataacggccggatagtgtttaaaccagctcaaaggtttctgcatttttttcaacacctttgttatgttttattaatttataaggttaattatagcaaaaaactcaactttctaaagagtttcagcgaaaaagttacaaaaaattcaagattgattgacttttttttgaaataacgttaatcttataacaataagaataagtgatgaccagtgataaagtaaaggctaagccccctacgacagagatgatttcacagctgcaagaaatcaatggcacgccgagactgcttttgaggtctgtgtggtcgcacaccgttggcaacaacgttatataattaagctaaaattaaggtggtaccgtgcatttaagcacccttgttcaacgacaggggtgtttttttatttggtatccatttggaggaatgatcatgggctatcaaaagccaaaaggaactgcggatattttacctggagattcaaaccagtggcaattagtggagaaaacggcacgcgacgtttttgcccgctatcaattcaacgaaattagaacaccattatttgaaagctatgatgtcttttcacggagttcaggtgatacatctgatattgtcagcaaagaaatgtatgatttcatggataaaggggatcggcatatcgcgctgcgtccagagggcacagctggagttgtacgggcgttcgtagaaaataaactttatgggccagaacatcaaaaaccttataaggtgtattacatgggaccaatgttccgttatgaacggccacaatcaggccggcaacgccagttccatcaaattggggtcgaagcatttggttctgagagtccagcggtcgatattgaagtcattagcatggcgatgcgtttattacgtgaatgccatattacggatttaaaactggccatcaataccttaggggatgcggaaagtcgcgcggcttatcatgaagcccttgtcagctatcttgaaccacattttgatgaattaagtgacgattctaaagttcgtctacacaagaacccattgcgcgtcttagatagtaaagatgctaaggaccaagaaattgtgaaggatgcacctgttattttggattacttaacaccagaagcaacggcgcactttgaaacggttaagcacttacttgaaacattgcacattccatatgaagtggatactgaaatggtgcgcggactcgattattacaatcacacaatttttgaaattatgacaaataataaggtgcttggtcgcggctacacaaccgtcttagccggtggccgttataatgggttagttgaacaacttggtggcccggacatgccaggggttggttttggcttaggcgttgaacgattattattattgatgaatgcgcaaaacgaagcgttggttccagaatctaaactcgatgtgtatgtcgttggaattggcgctgaaacaagtgcgacaactctccaaatcgttgaaaagattcgtgatacaggtttaaccgctgatcgagactatcttgatcgtaaaccaaaagcgcaatttaaaacagctaataagttaaacgcccaaatggtgattacaatcggtgaatcagaattagctgatcaaacagcacatgttaaagacatgattagtggtgttgaaattacggtaccacttgctgaagtctatgctgactttaaagcagtgcaacaacagttaaatcaaaattaacgcatataagatgcctcaaaagtaaatttgaggcatcttttttatttgatggcagtcaattcactttaatcctcaggaaatcctagactgctagaacactctaaatgtgttctgacagccatttccctccggttaattcgaagtgccaaacaagcgctgtgcgcttattcgtcccttcgctttaatcctcaggaaatcccagactgtcagaacactctgagcatatttgtcgctatctgtttgtatctgcttataataataaacacgaaggagtgatggatatgacagatgatttagaacaacggttaacgacggaacaatatgcggtaacccaacaaaatgcgacggaggccccatttaccggcgagtatgatgattttgatgaacaaggcatctacgtggatgttgtcagtcatgaaccattatttagttcgttagataaatatgatgcaggctgtggttggccctcatttacaaagccaattgcgcctttgacggaacgccgggaccaatcttatgggatggaacgcgttgaagtccgtagtgaagaagctaattcgcatttagggcacgtttttaatgatggaccgcaagaagctggtggattacgctattgcatcaactcagcagctttaaaatttattccagtcgaacaactcgaaaatgaaggttacggtcaatatctaagcttatttgaagagggggcacaataatggcaactgatacagcaatttttgccggtgggtgtttttggtgcatggttcatccgtttgatcagcaaccggggattatcaaggttgtttctggttataccggtgggcatgttcctaatccaacttatgaggaagtttgctcgcatacgacggggcacactgaagcagttgaaattacatttgatcccgcgattatttcttatgcggaattagttgaaatttattggcgccaaacagatccaaccgatgccatggggcagttccaagatcgtggcgatagttaccggccggtgattttcgttaactcgcctgagcaacgtgcaatcgcggaagcttccaaacaagcattaatcgatagtggtcgcttcaacgaaccgattgtcacgcaaattgaggctgccaaaccgttctatccagccgaagaatatcaccaagatttctataaaaaagaaccatttagagcagaattggtcgaggggacacgccgtgctttcattcgtgaaaattgggcgcattaattccaagaaatcctttagtattcacaaatggtatgctagaatgaaagacatcaaaagtggataggtgtgatattcaagtggacgatttagctcggaaacatcaaaatatggcgaagatttcggcagccattttatacggaatttgtgtgtcgattgcattgaactttttctgggaagaaggtggcatttacgcctctgggattaccgggttcgcgcaattcattcatacagtgacgtcgaaatttatgccgtttctaccatttccattatcaacgtcattgatgttattcgtgttaaatgtgccattatttattcttgcgtggttcaaaattggccaccatttcaccatttatacgtttattgcagttgttttttcaagtgttatggtacagattatgccctttacacagctaacggctaatccgattatctgtgcgatttttggggcggtaattaacggttttgggaccgggatggccttgaaaaacgatatttccactggtggcttagatatcattgggattgtactgcgcaaaaaaaccggccgttcagtcggttcaatcaatatcatgtttaatgtggcgctcgtttttgccgctgggttcctctttggttgggaacatgcgctctatagtatcttgagtatttttgtcaacggcaaagtcatcgatatggtttatacgcgccaacaaaaactgcaagtgatgattattaccgataagtccaaagttgtgattcaaatgattcaagacgaaatgcggcgtgggattacgattgtccacgacgtagaaggggcatataaccgtgaagaaaagacgatgttatttaccgttatttctcgctttgaaatgcatgatttagaaatggtcatgaaacaagcggatgaccacgcattcgtcagcatgacggaagctgtcaaaattctcgggcatttctatgaacctaagattaaataagataacccgccattcaattgaatggcgggctttttttatgggttaggtttcgtcttgctttttgttgcgctttctgtgacaatctaggtaatcaaaatgcatggaggtagtggaatgttattagggagtcacgttagtatgaagggcaagcagatgttactagggtcagcggagagtgcagttgattttggtgcaaatgccttcatgatatataccggcgcgccacaaaatacgcgccgcaaaccaatcgaagaattaaatattgaagcagcaaaaccctatattgaagctcacaacttaggtccaattgttgttcatgcaccatacatcgttaatttagggaatacagtgaagcctgagaacttcaagtttgcggtctcttttttacaagaagaagtgttacgcgctgaagcattaggggccactcaaatcgtcttgcatccaggtgcacacgttggggcgggtgcagatgctggtattcaacaaattatcaaaggattaaacgaaattttacgacctgatcaaaccgcccaaattgccttagaaaccatggcaggtaaaggaaccgaagtcgggcggtcatttgaagaacttgcacagatgatcgatggcgtgacttacaatgaaaagttatcagtgacgtttgatacttgtcatacaaatgatgccggatataatgtgcgtgaagattttgatggcgttttgaatgaattcgatcacattatcggtttggaccgcttaaaagttgttcatttaaacgattctaagaacccacaaggcgcacacaaagatcgtcatgccaatattggttttggtgaaatcggatttgatgcgctaaaccatgtcttacagcatgaacaactcgttaatgtgcctaaaattctagaaaccccatatgttggcgaagataagaagcataactttgcaccatatgcgtatgaaattgcgatgctcaaagcggggcaattcgaccctgatttattaacgaaggttgagcagaacgaaggcaaactatgaatttaaaacgaactaagtttggtatttttatcttaatagcggcgttttggacctttatttttagccagccagtccaggctgccgatacctatgacatcagtcgttatcaggtaaacgttgatgtacaacctgatgggagtgctcaggtcgaacaaaaaacggtgtttgatatccaagatgatatccatggggtctatatcaaccagaatctccaaacaaacgttggtcaaccaaagaagttggttaacccgcaagtcgcagttaatggtcatccgtttagtcaaagtgaatcaggtactgaaggcacctatagcttaactgatgcacaacaaaattatcggttcaaactataccaaactgcacaagatggcaatcaattagcggttactttgaaatatcagttacaaaatctgattattaattatcgtgatacggcggaattgaattggaaagtgattggcgatgcgtgggatagtgacttacaaaacgttcaagtggtaatacaattacctaccacattcaaaaaagcagacctcaaatcatggacgcacggcaatttagatgggcaacaagtcgttgaacccgataaaggccgggtaacaattaaactcgctaataatccagcaaaccaatttgtcgaaagccatattatttttccaacggcggtgactgcggcgaatccgaatcagattgatcaatcacgtcgggaagccattatcaaacaagaagcgcgtttggcgcaacaagctaatcaagaacgcaaagcacaaaaacgccgttattggcttttatctataggagcagtggtcttagcgcccggcatgttcttgttaattttacgtaaaattcgaaaaacgcttcctgtgatgacttatactggacaggcaccagaacacgtctatgatttgccagatgaaaatgggcctgcggttgtgcgtcagttgttggcattaccaattacggagacagcaggggcggagagcttatccgcaacgattctagacttagttgctcgaaagaatctaacaattgatgttcaggaaccaaagaaggaactattccataaaaaaacgccgcaattttcattaacgctcgtcaatcgcaatcagttatcacattcagaaaagaagttagttagctggctatttgatgtgattggtgatgggcagcatgtcagtctatttgagattgagaaatatccaaaacggcatagtgcaaaactgttcaatcaacattaccatgggtggcaaacagcagtggcgactgaagcaagtcgtagcgggtggttacgagaacacatcgctgagttaatgaccagtttgaattattggttaatcggccttggcgccctatttttaattttgatttttggtgctttgattggcttagttgcttggtggacgctcattccgatggggcttgtcttcattttaaccgtctggcgtagatttaatttgcaactatggacgcaattgggttacgaaaaacggggcgaatggcaaggctttaaacaaatgctaaaggatatttcgacactcgatatggcgaatgtcccagatgtactattgtgggatcgatatttgagttatgcaacggccttcgggattgctgataaggtcgttaaagctttgaagattcgattgacgccggaacaacttcaaacaatgcctctgggttattattattactacgggtatactggggggttgaacatcggtcaatcctttacaacagctctcaatagtagtgttggcagtgcggtcagtgctgctaatccaacaagtgttagtggtggttctggcggcttttcaggcggctcatcaggcggtttcggtggcggttccggtggtgggactttctagtccaatcaaatgattaggtgaaacgccaacacactggtattatgagcgttattaaaatgtaattaacgcgctaaataagtgttagttggaggaggaaagcacatggagtttaacgatgtggttaatcaccgcaaggcaattcggtcatttgacccaaacaaaccgatctcggatgaattaatcgaaaaaataatggtgtccgcccaacgaacaccgtcgtggacgaattcacaaccttggaaagtctatgtagcgacgggtgaaacgttagccgatcatttagaacgaacgggaaaccggatgaaaggctactctgatttaaacgtgattcaccggacagactggggaccgttaatggctgagaacagtcgcgtgtggaatgatgaaatcagtgcctatcttggcgaagacgggttagcgaattttagcgatttacaacgccatctgttcaacgcgcccgccgtgacttacttgacggttgagcgcaaagtttcgccatggatgatttatgacatgggggcttttagtcagtcgattctgttagccgcggctaacgaacaagttgatacaattcctgcctatgaaacggccaagtatccagatgcggtccgcaaagcaatgggtattccggaaaatgaactgttgattggtgggattgccatggggtaccgtagtgaagggatgattaatgcgtttcattcgcagcgtagttcggttgcgagttttttaacgattaaacattaacaaattaaaaaagcgttcaaatcgatttcagatttgaacgctttttttaattgacgtgatcgttcgcactgcccgcaaaatcgaggcccatgcgttcaagaataattgtggcagtttcttcgatcgaacggttggcaacattaatcacttggcaaccaatcttatcatacaggtcttgggcgaaagccaattcagctttaatttcgcccatgtctgaataagtggtatcaggatttaacccataagcaatcatccgttcccggcgaatgttattgaggacttctggtgtattcatcaggccgataattttcttaggatcaacccgccagatttcgtctggaatgtgcgcttgtggcacgattggtaagttggcaaccttgatattccgattggctaaaaagagcgacagcggcgtcttagacgttctagaaacaccgagcaacacgatatctgcttctaagaaaccgtgggggtctttaccatcatcgtacataacagcaaattccatcgctgaaatgcgatcaaaataacgatcgttcaaatgatgtagtgccccagcttcaccagttggcgtgctgttggttttagcagtaatcatttgtgtcattggtgacatcatgtcgaaactggcaatttttttcgcttggcaataggtttcggcgatttcagaaagaccgttagtggctaatgtatggaccacaattgtttcttcaggaaccgctttgcttaagacgtccatgagtttctcttgcgtgtgaacgaaggggaagcggacgagatcaggtttaacgtccggaaattgggcgagcgctgcttgtgctaattggagggcggtttggccgactgagtccgaaagcacaaaaacggttaatggtttagattctggcataaggcatgctcctttattcacttttatagcgctatcataccataattatcgaaaaaatcgctagatttgaaaaaatattcaattaattccctgtgggttattgaccgtattttcaacattcgctataatagcaaagaacggttcacgtgaagttaaatttttaacgaacgtaaacggttatacttagcacgcgaggggagggatatcatatgggcaagacagtcgttcgcagtaacgaatctctagatgatgctcttcgtcgcttcaagcgttccgtatcaaaagctggtacaatacaagaatatcgtaaacgtgaattttacgagaaaccaagtgtaaaacgtaagttgaaatcagaagctgcaagaaaacgtaagaagttctaatttcttagataaaggaaatgattgaatgagtttacttgaacaactaagttctgatttgaaaacggcgatgaaggccaaagataagttgcgattagctgttattcggagtttaaagaccgctttaactaacgccaaaattagtgcggggcaagacttatcttctgacgaagaattaagtgtactatcatcacaacttaagcaacgtaaggattcattagctgagtttgaaaagggcgatcgtgcagatctcgctgaacaaacaaaagcagaaattgaaatcgtacaagcttatttaccagagcagctagatgaagcagcagtggtcaccattgttgacgaagcaatgcaggctactggtgcgacaagtaaggctgactttggcaaggtgatgcaatatgtcatgcctaaggtcaaaggacgagctgatggcgctatggtcaatcaagtcgttaaatcaaaattaagttaattttaggcgggacttcctctggggagtcccgctttttttttatggtcgttaattcagattttgataattgaccataaattcgtgaattagcgcggctggctacttttaaaacggttgttgtttgtgatagaatgatggtagttttcattctaaaacaaatgaagttgaaacgtgcggttgcaacttgattcttcactttacgacgtgtagttaataatcgactaaagtcgtttattttctgggctagataatactcagaatcagttgcagtcacactctggaaggagttatctttgttggctgaaacagatgagcgtttatttcaattggcaacgccaaatttagcggccgctttaatgggcacacacgatacttttttaaaaatcatcgaggaaagcttatctgtcgaactgattgcgtttgacgagcatattaccattcgcggcgaacaaccagcagttgaccaagccgcttctgttttagaaaacttagtggcgctgttacaacatggcattaagctcaatagtagtgatgtggtgagtgcgacgaagatggcccaaaaaggcacgattgctggtttccaagaactttacacggagccaataatcatggatcgtaaagggcagcatattcgcgtgaagacattcggtcaacgtcaatacgtgaatgcgattcgtcaaaacgatgtcacgtttgggattggccccgccggaacggggaaaacattcttagccgttgtcatggccgttgcggcgttgaaacaaggattagtcgaacggatcattttaacgcgtcctgcggttgaagctggtgagagtttaggctttttaccaggtgatctaaaggaaaaggtggacccttatttacgaccgatttatgatgcattgtatgccgttttgggtaaagaacatactgaacgtttgttagagcgtggtgtcattgagattgcaccgcttgcgtatatgcgtggccgaacactagaagaagctttcgttattttggacgaagcccagaatacaacgcctgctcagatgaagatgttcttaacgcgacttgggtttaactcgaagatgattgtcaacggcgatattagccagattgacttacctaagaaaacaatgagcggcttggtgcaagctgaacatattttgcacgatattcctaagattgctttcgtacagttcagttcagaagatgtggtacggcacccagttgttgctaagattattaacgcctatgcggcgattgaaaagatgagaaagtaggaacacttgaatggatatccaaattatcgatgaaacaaaagtagttgcagaagcaaacgtaaaactggtcacggatattttagaatatgccgggcaacaattagatttacctgaagacacagaaatgtctgtcacgtttgtgacgaacgaacgcattcgccaaattaacaaggaataccgcgatactgaccgtgcgactgatgtcatcagttttgcaatcgaagaagatcctgaagaagaaggattaccagccaactttgaagaactattcgacattcccaagaatatcggtgatttgtttgtttcattagaaaaagcagctgaacaagctgaaacttatggacattcatttgaacgtgaattagggtacacaatggttcacggcttcttacacttaaatggttatgatcacattcatagtgaagatgaagcacaaatgattccattacaggagaagatcctcgatgaatttggattacaacggtaaaaaaccacaaacgggcaagaataaacatttttggcagtcactacgccacgcactcggtggattatggaccgcctttaaaactgaggctaatttacggcgtgatgcctggtttgcactcgttgcgattgctttcggtatttattgtcagttacattatttagattggttagcgattattttcgcgatttttatcgtttttatggctgaattttggaatacagttatggaacatctcgtggacttattagtcgatcaccagtaccatccagtggctaagcagattaaagatatcagtgcagccagtgtcttaatcagcacaattttagcgctattgattggcgccattgtctttggacacgccatatttaactaaaaaggggactattatgtcagaaacatatcgctcaggctttgtggccattgttggccgaccaaatgttggaaaatcaacttttatgaatcgaatgatcggtgaaaaaattgccatcatgtcatcaaaagcacaaacgactcgcaataaaattcaagggatctacacggatgacaacgcgcaaatcgtgttcgttgatacaccagggattcataaaccacataatgaattagatgaatacatggatcaagcagcgctatcgacgtttaacgaagttgatgccattttattcatgattagtgggattgataaaaaagggcctggggatcaatacatcatggaccaattgaagaacgtcaaaaaacccgtttatttggttgttaacaaaattgacgcgattcatccagacgatttattaccaatgattgaacaatatcggcatgaattagatttcaagggggtttacccaatctctgcattagaaggtaacaatgtccctgaaatgttaaaagaattggaacaaatactcccagaaggccctcaatactacccagaagatcaattaacggatcacccagaatatttcgttgttggtgaattgattcgggaaaaaattcttgaattaacgcatgaagaagtgccccattctgttgccgtggttgtggaacggatgaaagaccgcgtcaatggtaagctccagattgaagcgaatatcattgttgaacgtgatggtcaaaaacggattatcatcggtcaaaagggctccattatcaaagaaatcgggattcggtcacgtcgcgaaattgaagctttacttggcgaaaaagtcaacttgaagctctgggttaagattcaaaagaattggcgtgacaataaccaatacctccgtgaatttggttacaataaaaagagattgtaggcttaagcaatggcggaacatcgattcgaagactttaatggtctagtgatgtatcggaagaactataaagaaaaagatatgctggtcaagattttgaccgatcgctttggcaaaaagatgttttacttacgcggtgcgaataaaccgaagtttcgcttgagtgcggctattttgccatttacccaagctgagtacggtggcgacattcgcgatgatggcttatcctttttaaataatgtcaagtcggcgagtcagtttcaatcgattagcaatgacttgtttttaaatgcctatgcgacctatatcttaggcttagtcgatgttggttttccggatagcgaaccgctcggcagttggtatccgaagattgaacaggcactctcattaatcgatgaaggctttgacgcggcgatgattacgcacattatcgagattcagatgttacaagtcttcggggtgcagccacaactgcaagtctgtgcggtttgtgggcgttctgatttgccgtttgattattctgagagttatggcgggctgctttgtcaacgccactggcacttggatgttaatcgattccacggtagtcaacgggctatctattatctgcgtcttttttcagtgattgatttattcaagattcaatcggtcaacgtcaaacagacaacgcagatggagcttaagacgatgatcgaccggatttatcaagacacggttggcctatcgctcaagagtaagcaattcatcgataagatgtacagtttcgatagtcaattaccacaattaaaaaaagtgtcgtcagaaattgacagcacgccaaaagacgactaaaatagtaatcaacttaatagacgttgaagaaaagggtcccttaagacggtcagacagtgattctaggtgagtgagaactagaacaagacttgagtggattggcgtttcggagtcataccaatgaagcagcagctcgctttgagctgaagtagggtggaaccgcgagtaatcgtccctatgtgacttaacagtcgcataggctttttttatgcgcaaaatacggaaaagaggaattgaaatggttaaaaagttaaatgtgcaagaaatgattttaaccttacagcgtttttggtctgaaaaaggctgtatgctaatgcaatcttacgatacagaaaaaggggccggcacaatgagcccatacacgttcttacgggcaattggaccagaaccttggaacgccgcttacgtagaaccttcacggcgcccagcagatggtcggtatggcgaaaaccccaaccgtttattccaacatcaccaattccaagtggtcatgaaaccagccccattaaacatccaagaattttacttggatagtttacgggctctaggcatcgatcctttggaacatgacattcgcttcgtcgaagataactgggaaaacccatcaatgggttgtgccggtgttggttgggaagtttggttagacgggatggaagtgactcaatttacctacttccaacaagttggtggtttgcaatgcgatcctgtgacaagtgaaatcacatatggcgttgaacggcttgcttcatacattcaagatgtcgacaacgtgttcgaacttgaatggggcaatggcgtgttatatggcgatatttttaaagaacctgaatatgaacattcaaaatatgcttttgaagacagtaaccaagacatgcttttgaaattcttcgatgaatacgaaacagaagcaaaacgtttaattgacttaggccttgttcatccagcatatgactatgtcttgaaatgtagccacacattcaacctattggatgcccatggtgccgtttccgttacagaacgggccggttacttgtcacggattcgccggatggcgcactcaatcgcgcaagcattcgttgctgaacgtgagaaacgtggcttcccgctcttaaaacatgctcaagaatcaaacacggaggtcgttaacaatgactaaaccattcttattagaaattggcttggaagaaatgccagcccacgttgtgatgcctagcatccaacaactagaaaagcgcgtacgcgactttttagaagaacaacacttaacattcgggaccatcaaaacttacgcaacaccacgccggttagccgtcttgatcgaagacctagcggacaagcaagctgacattcacgaagaagcgaaaggccccgctaagaaaattgcgcttgatgctgaaggtaactggagtaaagcagcgcaaggttttgttcgcggccaaggtttaacgaccgacgacattacttttaaagcactaaaaggcgttgaatacgtctatgttgaaaaatcaatcatcggcaaacctgttgaaacaattttgccagaactaaaagccgtgattatggcgatgaccttcccaacgcggatgcactgggccgattacgacttcgaatatatccgtccaattcactggattgttgctttattagacgatgaaattatcgatttcagtattttaaacgttacgactggtcgcacaacacaagggcaccgtttcttaggtcaagccgtgatattggcaaaagcaactgattacgaagcaacgctggaagcacaattcgtaattgcggatgaagctaaacgccaaaacttaattcaaactcagattgaaacaatggcccaagaaaacgattggcaagtcgatttagacgcaaacttgttagaagaagtgacgaacttagttgaatggccaactgctttttatgggcaattcgatcctaagtatcttgaaattccagaagaagtgttgattacctcaatgaaggataaccaacgttacttctacgcacgcagccaagcgggtgatttattacctgttttcatcggtgttcgcaacgggaacaccgacttcatggaaaatgtcattgctgggaacgaaaaagtcctcacagcgcgtttggaagatgccgatttcttctaccatgaagatcaaaaggtaacgattgaacaaaacgttgcgaagttacaaaacgtgtcattccacgacaagattggtagtctggctgaaaagatgacccgtgttggtttaatcgcgcaattcttaggccaaaaatttggtttatcagaagcagaattagttgatttgcaacgggcaagtgatatttataaatttgacttagtgactggcatggtcggtgaatttgccgaattgcaaggggtcatgggtgaaaaatatgccttattacaaggtgaaacaccagccgctgccacagcgattcgcgaacactacatgccaattagtgctgaaggtgcactccctgcaacaaaggtcggcgcggttttagcaatcgctgataagttcgatagtatggctgatttctttgcagtgggcatgattccaagtggttcaaacgatccttatgcattgcgtcgtcaagcttatgggattatccgcatcttagaaaaccaaaactggcacttcccaatggccgattatcaagctgcgatgagtgacattgttaagcaacaagctgatttcaaccttgattggtcaaccaatgctgacgcgatcagcgatttcttaacggatcgtgttcgccaacgctttaacggcatgcggcctaaagtccggcgtgatatcgtagatgccgtcttgaagaatcaaagtcaagatccagtcgtgatgttcgaagctgccaaagtgctttcagaccatcaagatgatgcagatttcaaggcaacggttgaagccgtgacacgtgtgttacgactcgctgaaaaagttgactttgcaacaactgatttaacggttgatcctgcattattcgaaaatgaagctgaaaaagcactttacacagcggtcgaagacttacgtggtacaattgctacgaacccattagctgataattacggcatcttacaaacactacgaccattaatcgaagcttactttgatgccacaatggtcatggctgaagatgaagctgttcgtcgaaatcgcttaacacagttgatgattatcgctcaaatcgcccttaccttaggtgatttaaacgaattgattgttaaataaacaattcaaaaggggataatagcatgttacaaatgaaacgggtttatgaagcagcgacagactcagatgggtaccgaattctagtcgatcggatttggccccgcggcatttcaaaagaacgtgccgctattgagacctgggcgaaagaaattaccccaacgactgacttacgcaagtggtttggtcatgagccagctaagtttcccgtttttaaagaaaagtaccttgctgaaattgcagctaatccagcttggccggcgtttgaaaaggtagtgcacgagcaccttgagctgggcaacgtcacgttagtctatgcggcaaaggacctgcaatataatcacgttgtcatcttaatgggacttttgaaaaaggaccttgacaacgaatgagatagtttgctatatttatttgcaactgtacctaaatggtgctatgatatatagtgtatttttgtgctgataatccttaaaagtcgcatttcattgtgaggtgcggcttttacagtcttagtacaatttgaattgaatagtgaggtgagaccaatggcgggaaagattccgaatgacgtgattgatgatgttcggagccaaactaacatagtggatgttgttggtcagtatgtccagctcaagaagagcggcaataacctatttgggatttgtccgtttcacgatgagaagaccccatcattctccgttagtgaagagaaacagatttttcattgtttctcttgcggacggggtgggaatgtcttcaagttcttgatggaactggaacagattagttttccagaagctgttacaaaaatcgctgactttgtcggcttcagtttagcggagacttatcgacccactcaaaatgttcaagaatcaagtgaagtgacgcagtttaagcaactctatcgtcaggccaatgaactctttacgcatattttaatgagtactgaagcgggccaaccagcgttagattacttacacgaacggggcttgacggatcaattaattgagacgtttagtattggctatttaccggatcaaaccgatttaatgctttcattcttccagaataaagaagttccgtaccagacactacgtcaatccggcttatttattgaaactcagaccggcaagctgcatgatcgtttttccggccgagtgatgtttccgattcggaatgcgcaaggtgaagtgattgctttttctggccgggttttggtgaaacaaccagatcaacccaaatatttgaacagtcctgaaaccgtgatttttaacaagcggaaggttttgttcaactatgatttagcaaagactgctattcaccaagaacgcaaagtttacctgtttgaagggtttatggatgtgattgcagcgtattcagccggtgtttcaaacggtgtcgcttcaatggggacgagtttaacgactgagcagttgggaattttagggcaacaggctcgggaattaattgtctgttatgatggtgatcgtcccggaatcgaagcgatgaaacgcgcaattaccatgttgcagcaaaataccaagcttgaattgagtgtggtggttttgcccagtggcgctgatccggatgaatatgttcgccaatatggtgctgaacaatttaagacaaccttgcaaaatggtgctgaaacaccgattgcatttgaactgcggtatttgaagcaagggttaaatctggataacgagaaggatcaacttgattacgtgcaacaggcattgtccgtcgttgcgccaattgattcgccgcttgaaatcgagatttacctcaagcaaattgaagccgatagcggcattacccttgatacgttgaagcggcagttacaaacattgcgcgttaaacgggcaacgcaacaaccactttcaccggcatctagtcagtatgattatgacatgccacctgaaccggatgacgcatttgtgggtggaccaccgccaatcattggtgatccgcgggcaacagcgacgcgtcagccacaacggctaacccgggttgaacacgcggagcaagaagtgttgcatatgttgatggctaatgacgatatgcgcctgcaattggagaacaatgccgattttagttttgtgcataccccgtaccaactgatttacgagttatggcgcgcctttttagctgaaggtaagtcgaccttggccgacttcatgggttatatcccagatgacttacaagccttagtcgttcagattgatgcgcttgacttaccagaagaggcaagtcaagaggcgttaaacgactgtctgttcgtcattgcgcaaaataacgttgaggaacaattaagagaagcgaaaattgccttaaaagaggcgaccaaattggggaatgcgagcgaagaaacgcgcttaaccctggaggtcattagacttgtttcgcaaaagaaattaggaaattgatattaggaggtttctgaatggctgataataaaaaagctgacacgaagaaatttgatactgcggttaaggctttaattaaggaatacaaaccaaagaaagaaatcaccaatgatgaactcgttgcaaaaatcgtgaaaccatttgcgctacaagctgatgaaatcaatgaattaatgcaaaaagtggaagaccaagggattgggattgtcgatgaagatgggaatccaagtgccgctacccttaaaaaggaaaaggtttctgctaaagaattaaaagatatgactgcaccaaccgggattaagattaacgatcctgtgcggatgtacttaaaagaaattgggcgggtatctcttttaaacgcccaacaagaagttgacttagccttgagaatcgaacaaggtgatcaagaagccaagcaacgccttgccgaagctaacttgcgtttggtggtttcaatcgctaaacggtatgttggccgtggcatgcaattcttggatttaattcaagaagggaacatgggcttaatgaaggccgttgaaaaattcgatcaccgtaaagggttcaaattctcaacatatgccacatggtggattcgtcaagcgattacgcgtgcgattgccgatcaagcccggaccattcggattcctgtccacatggttgaaacgattaacaagttaatccggattcaacgacaattacttcaagatttgggccgcgaaccaacgcctgaagaaattggtgctgaaatggatatgaatacggataaggtgcgcgaaatcttgaagatcgctcaagaacctgtttcccttgaaaccccaattggtgaagaggacgattcacacttaggcgattttatcgaagatcaagatgcaaccagtcctgaagaacatgcttcttatgaattgttgaaagaacaattagaaagtgtcctagataccttaacagaccgtgaagaaaacgtcttacgtttacgtttcggccttgatgatggtcggacacggacattagaagaagtgggtaaggtgttcggcgttacgcgagaacggattcgtcaaatcgaagccaaagcattacggaaactccgccacccatcacgttcaaaacaattaaaagactttttagaataaaagagtgcgtaagcaggcggctatattttgagggttagcatagtcaggcgaataaccaacgatgttggttgtttgactgacgtagctagccgcagaaatatgcctgctagagcacgttttcgataaagtgcgtttagttacgggagcaactgagcattaatacaatattgtcattaattcagattttagaattaatggcaatgttagattaagcggaagttgttgaactaaaaagcacgtttaggcaatcaataaaaaggccgcaagctaacctagcttgcggccttttttgcgtgtatctaaacaagcagagcaccaatccccactgctaaaaatacaatccccatcaatgcacctgaccataacgccaggggcatgaagactgaagtactgtggtttgcttcaaccttcaaagtcttgaatgttttaatggtcattgaaagttggaaaacaccgatgattagcattaaaatcccaataattggtaaccagttcatgttaccacccccttcactgtaaataatttatcttatgttaactaggatttccgaaaactaataaagctcaaaaagaaggggctaattgacgtttataaccaattcaataaactagcaagactaatcccaataaagacaagccccatgaaagcactcgaacagagcgctgctggcgcaaagacagaagtattttgatctgcgtgtaattttaagtcttgataatactgatacgacttataaatttgaaaaatgcctaaaccaatcatgaaaacacagaatagttgcaaccaactcatgagaccactccttaatgtatagaaagcgttttcggtttaatttcagtataaaactaaattttgcctaaagcaacttctgctatccagaatcaagtgttcactttgaatacgtatgccgtctaaaatttggtatactaactataacaatcaaagtttctagaatggagttttatttttgtcaccaattcatttatcaaagcgtttagctgcggttgcgcagtttgtcccacaagatagcattgttgctgatatcggttcagatcatgcatatttaccaatttggcttacggaacaaaaccggttgaagggcgccattgccggtgaagtagttgccggtccgtttgaatcaacacagactcacgttaatcaatggcacttacaacaacagattcaagtccgcttaggcgatggcgtcgaggtattgaatcctgaagaagaccatgtgagttgcatcgtgattgccggcatgggtggtttattgatcacggaaattttaacccgtggattggatcatctgaacggccatgaacgactcgtgttacaacccaatatcatggaaagtactgtccgtgaatggttgaatgcacatgactatgcaatcgttgatgaagcgattgtcgctgaagacgggcatatctacgaagtgattgtcggcgaaccccaaccatcagttgcaccattaagcgaaagtgatcgagtgtttggccctgttctccgccaaacacaacctgctgatttccaattgaagtgggggacaatgttgaaaaaacggcgtcatttattgcaacaattacaaaacgcacaagtcgtacctactgataaagtcaaagcagttgaacatgaaattgcattaatcgaggagatgaagacatgggaaaattagtcgcgagtgacttaattgctgcgattgaagactacgcaccattggcattaaaagaaggcaatgaccccaccggttttcaaatcgggcgacgcgataaaagcattgaacgggtgttagtaacccttgatgtccgcccagaaaccgttcaagaagcgattgaacagaatgttgattttatttttgcccaccatccagtaatgtttcgcccagcgcggaatctcgatctaagtgatccgcaaaacaagatgtatgcggatctgttaacgcatgacatcacggtatatgccgcccatacgaatttggataagactaacggcggcatgaatgattggctagctgaagctttacaactaaacgatgtgcaaccgtttaacatcacggactaccaatcattagtaaaattggtggtctttgtccctgagtcacatgctgaacagatgcggatggcattgaatcaagctgatgcgggacatattggcgattatcaagcctgcagttttagtacgaccggaatagggcgttttcaaccaacggacgcagcaaatccttatatcggccaatcaggtgatctagaagcggttaccgaagttaaaatcgaagttgttctgccagtggccatgcaaaccaaagttgttcaggcgatgcttgcggcgcatccttatgaagaacccgtttatgatgtgattccattagctaatcaacaacaaccgattggtattgggcgcattggtcaagtcgctcaatcaatgacggtccgggattatgcgcaatttgtctgcgaaacatttgatttaacaggtctgcgcttaatttcaaatgaaccggacaaaatagttcagacagtcgccgttgtcggtggcgatgggggtaaattcttcccagccgctttacaagctggtgcggatgtctacattaccggtgatgtgtattatcatactggtcacgatatgttggcagctggtttgtcagtaattgatcctggtcatcatgtcgaaagtattgtgaaggataagatgacagaaatttttgaaaagtgggccaaacagcgtggttggtcggttacattcattaaatcacagcaaaaaactgatccgtttacatttatttttaatgcggagtaggttagaatagaattagtattaaataatatctaggaggctacaccatggctaaatatgaaaaattgattcctcgttttctagaatatgtcacaactgaaacacgttcagatgaaaacgcaacaacgagcccatcaacccaaacacaagtggtatttttacacaaattgatggccgacttgaaggaaatcggattaagtgatgtgaaatacaacgaaagtaatggctatgtaacagcgctattaccaagtaatattgataaaaaagtgccaacaatgggctttttatcacacgttgatactgccgacttcaatgccaaaggtgtcaatccacaaatcgtcgaaaactatgatggcgaatcaattattaaattagatgatgcgggtaaattcgtattagatcctaaagaattcccaaatatgaaaaattataaaggccaaactttaatcacaactgacggctcaacattattaggttcagatgataagtctggggttgctgaaatcatgacagccatggacttcttagtccaacatcctgaaatcaaacatggcgacatcaagattggttttggccccgatgaagaaatcggaactggcgctgatcactttgatgccaaagatttcgcaaccgactttgcttacacaatggatggcggtccaatcggtcaacttgaatacgaaacattcaacgctgctgccatgaaagtcgatattcaaggtaaaaacgtgcatcctagtgaagctaaaaacatcatgatcaatgcccttcaagtggctgttgatttccaaaatgctttaccaagcgatgaagtccctgaaaaaacagacggtcgtcaaggtttctatcacttattaagccttgaaggcacagttgatgaagcacacatggcttacatcattcgtgatttcgaacgtgatggtttggaagaacgcaaagcatttgctgctaaagttgctgatcaaatgaatgctaaatacggtgaaggccgcgttgttgcaacaatcaaagatcaatactacaacatggcagaagtcttaaaagatcacatggacgttgttgatcttgctaaagatgcaatggaagccgttgatatcaaaccattaatcgaacctgttcgtggtgggacagatggttctaagatttcattcatgggtattccaacccctaacatctttgctggtgctgaaaacatgcacggtcgctacgaatttgtttcaatcgaaacaatggaaaaggccgttgatacaatgcttaagatgaatgatttaaacgttgaacggaactaatcaacaatctaaaaagccccgcacaaattgaatttgtgcggggctttttttgtgcggttaattttgatgcattgtcaacaagcctttgagttgttcaatgggtaattggcctggtgcactggggtgttcaaggtaaccgaagctcacagctgaaccgaattgaccaccaaaaatgcgagaggctaagccaaattcagacatcgccatcgtgatcagtggggttgtgtgatcatgtgtaaaagactgggtaatcgccattaaccgagtagtatcctcattactttgagcggtagttgctagttttaacatatctgggtgcgtcgcatgcattgctgcgagttgtttttgaagtgttagattatcaggggttgtctttaaatcgtgatggcttagtaacacttgatagccattcgcacgtgcaagcgcgctgacggcttttctaactgcctcaggtaaagaccactcaatatcaaccacatcgccgatttgagctgataatagggctgtatagcggtctaaatagtcggttggatcagacaggccgccatcatgggttgttctgagcgttaaaataacggggtgcttgcaggcggcaatttggtgaccagccgttaataaggtcgctggtgtttgccaatagtctaagcgccattctagaatatcaatcgcagcttgcttttgctcaacgagtgccatttcacgcacacaatcgtctaggttacgcggcattaaggaaacggccgtttgtgtctggccagtgccaacatggagggtcatcaaatgacctcactttctaatcaaaatggataaacaatttttaaatcgataaggtctattttaagagaaaaagttgtttaacgcaataaacttaaccaattaaataacaaaaaagaaccaccaactggtagctcttttatagggattgattaatatgagcgacacgatattgaccatcaattaatttaaacgttcaaatttcgctgaaacgttcaatataagccgcttcacgacgttggtcattaaccgtggctgtctgccgctcatcagtgaagtaatcgcgcatttgcgctgtcactagaatatcttggcggttcggtttttcaggtaataataactcagttgaaacaatggcgatactctcaagttggttatgtttgtggtgccgttgataacggtttaagatgcgttgttgttggtgctgaaaatggggtgtcattaagtctgccacgtcgcttaagtcatttgagggccaagctgtttcaatttgatagaatgcattttcaaagcgcgccgcggtttcagcatctaacggcatggtatcagccagagcccgttttctacgtccggttaaccagtcacgcactttacgccaaatcatgatcccaagggagacaaatacgaaaagcagggtgactatactatcgaataaacgacgcatcggggacttgtagtaatgccgatatcccgcatcatcgtaataataatcacgactacggccgccaacataaccggatgtcggtgaagacccgccaccgctaccaccggatccaccagagccacccgaagatccgccagcacgcgcagcaactggacttggtaataagtattgaatatatcaaatagcgtgttactgattcgatcaggcatgacctactatcttctcacaacagtaaccctgtgatgaactagtgggtctttttcatgtcattataagaaagaggggtaagatgaaatttcaaaaaaattttaataataatgctgccctggttgaagatgaacaagcgcttgagtggattgtcattggtaacggcgtcggttttggcaaacagcctggtgatttagttgatgaagcaaaaatcgaacggcgctttattgcaactggttctaaaggctttgatgttacccaaatccaagcattgacggcaattaacgctaagatgctagccatcatgtctgaaatcgtggcgctagtcgaaccagcacttaatactaaaattaacgatcgccaatatctgattctagcggatcatcttcaatttgcagttcaacgaatcgatgcccatgtgacgctaaccgatcagtcgcttctgtgggaactacggaatctttttccaactgagtaccaaaccgcacaacagacaattgcgctcatcaatcaaaaattaggtttcacccttccagacggtgaaaccgtcccgctcacctatcatttcgtcaatatcaaaaacggcgatagcgaaattgaagatacgatgactatgaccaagctcgtggccaatatcatcggcattgttcaaaaaactttgggattattctagatgaagattcctttaactacagtcgttttatctcacatctacgttacttcattattcggcgactaaaaaaagcccaggaacctgttacacaactcgatccggcactgctggcgatgatgatcacccgctatccacaagcttatcaagtcgtccaacagatttctgcttttttaaagcatgaaatgaactggactttacagtctgatgaagcggtttatctgctcttgcatatctggcgtgtcacacaacatcaacaaactgaataaaacggtgtgttactgattcgatcaggcattaacccagttaacgaatgcaacctatttttaggctgtattcattagccgggtttttgttttaaccattattaatctaaggaggtactatcatggcttacgaacaacttgcaacagatatcttggcaaacgtgggcggatccgacaatatccgcagcgttgtccactgtaccacgcgcttgcgtttcaaattaaaggatgaaaaaaaggcgcagactgacacgttaaaaaatatggacggcgttgtgaccgttgtccaaagtggcggtcaatatcaagtcgttatcggtaatcaggtcgcagatgtgtacgatgcccttttaaaaatcggcaacattgctggtgaaggcatcgtgcctgatgatgacgatcaacaaccgaagatgagcttgcttgaccggttcattgatttaatttctggcatcttcgcaccaaccctaggcgttttagctgcaactgggatgattaaagggctcgtcgcgctctttgtcgcagtcggttggctcacgactaaatctggcacttatcagattctattcgcactcggtgattcattcttctatttcttcccgattatgttgggctacagcgccagcaagaaattcaaagtcaatccatttctcgggatggtgattggggccaccctcgtttacccatcgattgttggcctaatcccttccacgttggcacagtccggggcaaagccactctacacattatttgctggcaccctttttgaatctcctatctacaccacattcctcggcattccagtgattatgatgagttatgcatcatctgttatccccatcatcgttgctgtttggttcacttcaaaagtcgaaccattcttcaaaaaagtcttaccagaagtgattcgcacattcttagtcccgttttgtacagcgttagttgttgtccctgtggctttcttagtgattgggccattatcaacatggctcggtgatttattaggggccggtagtaacgcgctctatcaattcagcccagttgtgaccggtgctgttttagggggactctggcaagtattggttatcttcggactccattggggcatcgtgccactggcaattctcaacatttccacactcggttacgacacgattttaacgctcgtattcgctgcatcatttgcacaaatcggttctgttttagcgattaccctccgaactaaaaatataaaattaaaaggcctaggttggtcgtcattcatctccggaatcttcggcgttactgaacctgcaatttacgggatcactttgccacgaaaaaaaccatttgttttcagttgtattggtggcgcagtcggtggaattttactcggtttattcgggacacgtggttacttagttggtggtcttggcgtctttggtttacccaactttatcaatcctaaaactggtctcgatatgaccgtttatggtgcaatcatcgcttcagctgtcgcttttgtggttgctttattattaaccttattcttcggtatctctaaagtagaccaagtggctatggttgaaacaccgacaactacaccagaaacaacaccaagtactgctactcccgctgcgaaagtcacacctgaaatcatcacaagtccgcttaacggaactgtccaattgctctcagcgttaaaggaccctgtcttctcatcagcggtgatgggcaaaggggtcgccattattccttccgatgggcaacttttcgcaccggttgccggcacagtcagcctcgtctttccaacgggacacgcaattgggattaattctgaacatggcgccgagattttaatgcacatcgggatggatactgttcaactcgaaggtaaaccattcacagttcacgtgaaacaaggccaagcagtcctgcctggcgacttattactcaccttcgatatcgaagcaattcaagctgctggttatgaaatcgcgacacccgtaattatcaccaacagtaatttatatgacgctgttgatccattaatcacaagtggccgcgtcacaaccaacgataaacttttaaatctcaaataatacttaaaggagaccgatgatgactaatcacacaccatttccaaaagactttctctggggcggcgcaacggctgccaatcaatacgaaggcgcctatcaaaccgatggcaaaggtttatcgcttgtcgatatcctgccagacgcgcatcatggtcgttgggaggcgttgatgcatcctaaaaaggcacaagctacgcaatacgacttttatccgttgatttctatcatcattatgaagaggaccttcgcttgatggctgagatgggctttaaaacttatcgactctcgattagttggccccgtatttttccaaacggcgacgacccaacacctaacgaggccgggcttaccttttacgactgcgtgattgatctttgccgtgaactgcatatcgaaccactggtcactatcaatcacttcgatactccgttggcaatgatggacaaatgcaacgggtgggcagaccgtcaaatgattgatcactacctccgcttttgcgaggtccttttcaaacgctacaagggcaaagtccactattggttaacgtttaatgaaatcaatatgattttgcatattccatttttaggtggcggcatggatgtctcagataccaatcattcggatcaaattaaataccaagcttcccatcatcaactggtggcttcggcattggcgaccaaacttgcgcatgaaattgatccagacaatcaaatcggttgtatgctagctgccggtgaaacttatcctaatacaccaaacccagctgacgtcttcaaagcactagaaaccaatcgtgaaggctacttcttcattgacgttcaatcacgcgggggcctatccaaactatgccaaacggctctttaaagctaaagaggtcgtcttagaaatgacgcccgacgatgaagcgattctcaaagccaacacggtcgattttatctcgtttagttattattcatctcgtttaaccagcgcggacccaaccgtcaacgaccaaactgaaggcaacgtctttgcctcactcaaaaatccttatctcaaaacaagcgaatggggttggcaaactgatggcctcggtttacggattacaatgaatcaactctatgaccattatcaaaaaccactcttcatcgtagaaaacggcctgggcgcacgcgatacagtcacagcggacggtcagattcacgacgactaccggatcgcttatctgcaagaaaatatcaccgcaatgggccaagcgattgctgatggcgtcccttgtatcggctatacctcatggggctgtatcgatttaatcagcgccggctctggtgagatggcgaaacgctacggctatgtatacgttgatcgcgataacgacggccacggtaccttagcgcgtacaccgaaagattctttctattggtatcaaaacatcattaagaccaatggtagtgtcttatatgacggacaaacattttaattttctggagggactactatgtattcaaaacaaccaatcactggctttaaacctgattttttatggggtggtgcaacggccgcgaatcaaattgaaggcgcctggaacattgatggtaagggactcacaactgccgaagtcgttcaaaaagccactgaccgtcagaacttctcgatgaacgccgtaaccaaagacagcattcaaaccgcgattgacgatccacccgataccctttatcctaaacggcgcgggatcgatttttaccatcattataaagaagacatcgccttatttgccgaaatgagcttcaaggcttttcgcatgagtattgcgtgggcgcggattttcccaaacggggatgatgcacaaccaaacgaaaagggcttggcattttacgataacgtttttgccgaacttaaaaaatacaacattgaaccagtcgtcaccctctcccattatgaaatgcccctggcactgacgttaaaatataatggttgggctagccgcgaaacgattgccgcatttaatcgctataccgaaacggtcttcaaacgctatcagcatcaagtgaaatactggatgacatttaacgaaattaatgcaggtacttggggcttcactggtaccggcgcggtagatgatacgctcgcccccgatgaacaattacaactgcgctatcaggcactgcatcatcaattcgtcgctagcagtattgcagttaaacaatgccacggattaatgccagatgctaaaatcggttcaatgttagcgcggatgcaaagttatcctaaaacaccgaaccccgctgatgtgcgccaagcacaacaagatgatgaattgaacctctttttcaccgacgtccaagtccgtggcgaatatcctaactacatgaatcgctacttcaacgaccacaacatcacacttgaaatggcgcctgatgacttacaactaatcaaggactacccagttgattatttaagctttagctattacatgtcgatggtcagctcagcgaaacccgctggcgaaaaaacagccggcaacttaattctcggcgaaaaaaatccgtatctcgaagctagcgattggggctggcaaattgatcccgttggtttacggattaccctcaacaatctctgggaacgctatggtgtgccactcttcgtcgtcgaaaacggcttaggcgcaatcgatcaggttgacgcgaacggccaaatccacgacgagtaccgcattgactacgtgcgcaagcatatcgaacaaatgaaagaagccgttaaagatggcgttgatctgatgggctacacaatgtgggggccaatcgatttaatcagcgcttcaacttctgaaatgtctaaacgctatggctttatctatgttgaccaagatgatgacggcaacggaacactcgcccgcagtcgcaaagaatcgttctactggttcaaaaaggtcattgctagcaatggtgaagacctataatatcgaagaaaaagcccctgacaaaagtcaggggctttttgattatactttaaaaataaattgatcaaatgcttgggcgatcccgtccgaatcgttatcagcagtaataaagtcaacgtgcgcctttgcttcagctgaaccgttgcccattgccaccgcagtaccggcaaattggaacattgggatgtcatttttctcatcgccaatcgccatgatttcatccggcgcgaatccaagtttattcgcgaggtattgcactgctttgcctttattaacatcagcgtgcatcacttctaaaaagaggtcagccgcacgaacaacataatgatcagttccaaattgcgcgcgtacctgtggttcatgtgcatctaactgttcgctggcccctgtaaagaccgctttgaccatctgcgtggccgcgtcgatttcattcggtttgcgaatatgaataccagcttcgttttcccaagcttgcaccaccgtcattggtgcaacattcacattactcgtataaaccacactattttgatcgagcacattatacggtaagcccgttgcttgcgagtagtcgtcaatcgcttggtaggtttctcggctgatgccagcttctttcaagattttaccagacgccgtttcgataatactgccgttaaacgtaatcacgtattgattatcaccggcaatccctagttaatttaaaaagggcaccacgccagctaatgggcgtccggaacacaaaacgactttcacaccctgttccagggccttagcaacttgttgtttcgtactggctagcagttggtgctgtgaactcaataatgtatcatcaatatcaatcgcgactaatttaatcgtcatctcaaaacccctcaaattgaatttaacttgcacaacgttcgactacatatgtttggcaattgtttcattaaccgctgctttttgatcttcaatcaatgcaacccgactttcgatgactttaatgtccatcgtaatttcccgggttaagcctggggtgttgagcttaggttcaaagaaggctttgaactctgccaaccgttctggggtcttaaagattgcggcaatcgaggtgatatacgttgtaaattccatatcaccgccgactgtctcttctagccattgccaatcgttgcgaatccaatcccaggttgcttgttggctcttgtcgttggcgagtaatccgcggaaccaagcccgcaaatcttgtggtttgatggtgctggcatcttcaaattttccaattaaggtcgcaattaattcaggatcagtcgtgcgcgttaaggccgcagtcaaatcattcttatagctcgcatcactcgtttggcgataagctgctaagagctgatcataaagtgcggcattcccgaagttttggacctcattcatcaagaccagtacccgaattgcggctggtaaggtgaccagtttttcttggttcgcttggaataaagtatgggctacatcaatggctgcttggtttttagcatacaaggctgcgcttaaaacagttgggcgcattaactgatcgtcattgctatcagtcggttgaaccagccaacctaatcgcgcaacttgcgctttactcaattggtcgaagaatcgacgcaggtgttgttcactttcttcaccaggtgtcacaaatttcttcaagttaccagcaaccgtgtaaagggcatctgccacgacatttgaatcactcttggcaaaaggtgctaaaacaggcacaacatctgcgtacgaaatttgacgtccttcagctaataagcgtaagtcttgcagtagttgcagttgtccaattggtgccatgtcagcactactatttaaaatatcatctaataatgtttgatcgtaatgaacaatgaaatgcgattcgttccccacgtttaagcggaatggttgcccattgtcggcgcgtaattgagcataatcaccgagtaccaattcacggtcagtcatcaataatggggctgccgcatagttgctcttcaatggaatctgccattgacgcccaacttcttgaccctcaccgataaagaattgttgttggttaagcgttaattgtccgtcaacgactttggccgttaccactggataacctggttgttcgagccatgaatgcataatggccccaacatctaagttagcggctttccccagtgctgcccacaagtcagcgccagtcgcatttccgaattgatgtgctgcaaaataagctttcaaaccagcgcgtagagcatcgtcaccgattaaagcgcgaaccatcacgagcatccgggcgcctttggcatacacgattgcgccatcaaataacgcatcgatttcggctggattattgacttgcacatgcaccgattggaccccatcagtcgcgtcacgttgtaaggctgccgctgcttctgaggtttggaaactttcccaaatatgccagtccggctgcaatgcatcgattgcgacgtattccatcatattggcaaaactttcgttcaaccaaagatcgtcccaccattgcatcgttactaaatcaccaaaccattggtgtgctaattcatgcgcaatcacagtcgcaacgcggtgtttcgtatccaaggcagtattatcaggatcgagtaataaataagcttcccgataagtgactaagccccagttttccatcgcgccggccgaaaagtcgggtaatgccaactgccatgaatggggtaatggatagggtgtttggtagaagtcttcaaagaattcgattgaccgtttagcaatgtccaatgcaaaatcgagttcgtttgcttgatgtgccttagtagcaaagacgccaacttgcacgccgctctccgttttagtttgaaccccttgcaattcaccaaaagcaaaggccacaaggtacgttgacatccggaccgttgtttcaaagtagtgaacgccatcgatgacttctttttcaggcatgttgctcagaatcgtttcgccttcgtgctcatcgaatttaatcgctaaatcaaaagtcgctttggcttctggttcatcaatacatgggaaagcttgccgcgcaaaattggtttcaaattgcgtcccgattaattctttttgcaccccatcgacttgataataagaaggatagatgcccatcattgaatccgttaaagcggcagtataggcaattaccaaagtcacttcgccaggttggccgacttcgactttcaaggcatttgcgtcattatcaactgtaaacggcacactcttacctgcagccgtcactgtttcaatcactaaaccgttctgatgaattaaaacaagtgcttctttagcagtccccgtaattgtcgtccgaccactaaattgtttttgagcccgattaatatctagaaaaacttgataatgttccggttgaaagctttgataaaaacgcatcaattctgccatattatgatctccaatttcatttagaatactgtcattatacgacttttagcctaaaaaagctgttgtcatccatttcatattttgattatcagcttggttgcacttaattaaaaaaatcaccttaatcttaaaaaacagattaaggtgattttttattaattctcagtagctaaataccactttgaaacgggctcgcctaagcaatgccttgtgtttagctacatcagtcaaacaactaactgcatcagttattcgcctgcttaggctaatcgcttagtcgaccacttttttaaacttgttgtttagctgggcgaattaagacttcactgaccactacatgttctggttggtcaatcgcatataagactgcgttggcaatgtcttctggattgagggccaacgctgattcttctggtgcatccattaattgcttaaccccttcgaaaacagcagggttgccaatcgtattcaccaattctgttttaacagcccctggtgaaacaatcgttgaacgaatgccgttatctttttcttcttggcgcaagccttccataatagcgcgtactgcatatttagtcccgttataaacggcagaagctggataaaccacgtgcccggcaaccgaatcagttgaaataatcaaaccatcttgttgggcttgcatcgttggtaagaccgccccgatcccgtttaaaacgcccatgatgttgatgtcgagcatcttttgccattgatcataatcgcgttcgctcaggtttccttgtggcatcacgccggcattgttgtataaaacatctacgcaaccgaaatgatcaagcgccaattggactaagctcgccatttgagcccgattagtcacatccgttgcttgataaatcgcatttgcaccgatttctgatgctaaagcttgtaaacgatcttcacgacgagctgctaaaacaaccttagcccctttgcttgctaataatttggcagttgctgccccaatccctgatgaggcacctgtaatgatcacgactttattttgaattgacatgttaaaactccttttctaatttgatttgacgcatgactttcgctggcgttccggcaacaatcatattgtctggtacatctttggtgaccgtggcgttagcagcgacaatcgcattctcaccgaccgtcacccccggtaaaatcgttgcgccggcaccaatccatgcgttctgtttgatatgcactggtttaacgaataaaccgcgccggtcaggcttttaaagaagccctcaccaaccagaccaataaaaagccgccacgctaagcgtgacggcttttttaacccacttgatttgcgaaatttcttaatttatgtccgttgctttcccaaaataggggctctataatgcctatgtaatcttatctggaggtcttaaaaacatggaaaaaactgaaaaaatcgcgattttagaaaaactggtctcaattgatacaacagaccaagcagaaggtgtgattgccgactacttagccgatctattcgcacaacatggtatccatactgaaaaagtggcttctaaaccaggccgcgaaaacttagtggcctatctaggcaaagcaaccgacaaagtcctcggtgtcactggtcatatggacgtcgtcagcatcggtgatcgcagcaaatggacgagtgatcccttcactctaaccgctcgcgatggtaaactcttcggtcgaggcgcaaccgacatgaagtctggtctggctgcgcttgtgattgcaatgatcgaattacacgatgaacatgttcctctaaacggccaaatcaaactactcgcaaccgtcgatgaagaaaagaacgaaactggtgcgcaaactttaaccgctcaaggctatgccgatgatttaacagccttattagttgccgaaccatctggcgttgataaacaagccttggcaaataaccccgacaaattccccacagaaatggcccaaaaactccttgcggctaatcaaaccaatgaacaacatttcttaattttcgcccataacggttcccttgattttaaagtgacggcaactggtaaaaccgcgcacagttcaatgcccgcactcggtattaacgcaattgatcatttgcttgcctactacaatcggcaaaaacaatacttcgatcagaaacatcctattgatgatgtcctcggcgatatcgtgcctgtcacaaccttaatcaacggtggtgaacaaattaattcggtccccggtcacgcagaacttacttgtcgggttcgtacaacccccgccttaactggcgaccaagtgattgctgacctcaataccatcattgcggaactcaatcaacaggcagacatgaatctggaattgaccgtcattaataaccaaccacccgttaagagcaatccacaagcaccattcattcaagctgttcaaaaaatcggggcacaaaagttatcccaagcttatccactgatgcacgttgctggcggtaccgacgccgcccaccttgctaagcacaatcctgacttaccagtggcagttgtcggccccggcaatgatactagccacatgattgacgaatatgttgatgaagaaatgtacctcaaacacatcgacttctttaaagccgttatgctggattacttaaaataacaacacaaaaaaacatcacctaatatatgccctacttaagagcttatcggatgatgttattatttaatcgtgatacgccttcaagctatttttaagctaaggcagtattgatttcttgtgctaatgtttctttccgttgtaacccaaccatttgttgcactaattggccatctttcatgaccaacaaggttggaattgattggatgccgaattcagccgccaagttttggttgtgatcaacgtcaactttggcgattttagctttacccgcgtaatcgtcggctagttcttcgacaattgggccttgcatccgacatggtgggcaccatgttgcccagaaatcgactaatgtgaccccttcttgaacttcatctttaaagtttgcttcagttagaatttgtgttgccattgcgatcacctttcttttcaagaaaatcattcaacgatttcattgaattactcataatataccaccattgggacgtgccgtcaaaaaggacgcttcatcttattccgtttcggtcataactcgcgaccattcccacactgattgattaaacgttgccactttaaacccagcagcttgtagttgttgactggcaacattggcgtaagcacatagacgaccacgacaataaaccaccacttctttatccttggggagctcagctaatcgttgatccaactgatcatatggcacattgcgtgcccctggtaagtgttgacttgcaaactcatctgcgggacgcaaatcaatcaaacacacatcgtctgccattaatttcgttttcaatgcgtcaccagttaacgcttcgggggcacctgtttcttgcgcgagtgttttttccaaaatcgtcatctctggcaaagtttcttcgcagacatcaaccaagagggttaccaattgtttgacccgttctgaatttaaacgataagtaacaaaattcttctcgcgttcaatcgccactaagtttgtttgtttcaaaatttgcaggttccgtgaaacggtagcgacacttaagccgactgtactggctaagacttccaccgttttggggccttgcgcaagaatgttcaacagttgtagacgcgtcacgttccctaacgacttcccgactttgaccacctgctcataaaccgcatcccggtattctgtaatgcgttcatccactttcatcgcctcccaacaatcaacgcctttattgaatagaatcaatttaacatttctagacaagtgggtcaactaaacaagctaggcaattaaagtaagacacctcagttaattgctttcttcaaatcaacggtgccctgattagcttctttatctgtaatttcaaaaattagtataaattgccactcttgaccgactttatcagttacgttcatttcagtatatttccctatctgaattcctaattaaatgaactaatgtctaaaataaaaaaagaaccaccactcaagctatgtactaggggcctgtcaagttgccggatgaaataatataaaatttaatatgttcctaaacggctttattccagtattcatctggagtaaggccgtttctttgtgttgaacgattatagtgattaaaatattcgattcctgcttcaaccaatttcattagttcttgataggtctttggcattggatgtcgtgccatccatcgatgcttaaattcattccaccaacgctccatcggggcgttgtcatacggtgtccctggtcgggacatacttctagtcacctcatattgatcaagatagcggctaaacatttttgatgtatatgctgaaccgcgatcagtgtgcaccatagggtgcactacactaccagccccggcaaaagcttgctgaaacacttaaacttctgtttcactagtttcggtagggcttagatgataggacaacagtcgccgaccataaagatccaaaacgccacttaaacgaactttatattcgccatttatgccatacgaaagttctgttgaatcggctaaccaaacttggttaggtctactcacattaaaattttgattgagaagattatcttgaatatattgttctgattgcttcacacggttatgcttcttcggatgtactaaacaccgaatgcctagttctcgcataactcttcgaacttgtttaaaagtaacgggaaaagtaattgatgcgtcagcttgtaaattcactaacatatttccagtaccgattccttgtagattgaagtcaaaccagtattgagttcgttctttaagttatttattacgtgtctcccaaacagtttctagtctttttaaccctttgttataggcttgacggctaacaccaattatttttaggagtttggtgatcgcgccatgttttcctcggctaacatctttaatcgcgtagtatgctagctgcctttgtttattcaccccttgcgctgaagttcctgatatttttttatgaatgccacatataatttctggtcttcaatctgactctctaactcgcgaatccgtaggttcgccttatctaaatctgctagttctgattgtattttatgatgaccgcgattatcaacgagtgcttcataaccaccgtgttgtgctttaagaacccacgaacgagcttgctggtaagaaacaccgaagtgttctgcagtttcagtgtagctgtgcttatccttagtggcatattcaacgattgaaatccgttcttcaaaagtagttttacgactcataacagggacctgccttctggacggtgatgccgtcacggttttatccttattatactcggagacccagtctcttagttgctttttagaacgtaatccaaatttaagtgcaacttcatttaaggagtaccgttcagataggtaggttactactgcttctaattttagagcttttgggtaatggttattatgacgtgcttttcgtaaaccatcaataccatctcgttcatatcgatttaaccagtggttaaatgtagttagatcaatgtcataccctctagaaaaggcctcctttgatattccggatcgtttaaattcttcgatcagtgttaatttttcgaatgctgtgtatttagatctcggcatacaaaaatccatccataattatcaaatgaaattatattatttcatctgacaaccataaagggattattacactatcacaatatcttgggtggtgattctttaaatgataatgaattctttggataaatatgtcaaaagcgacaaacggcgagaagtctctcatgcctgtttttgccgtttttttaatctacttgattaacgctcgttaagttagttagcattcgttcatccaacttatccgcggtaacttctgcgatgatttgttcgtaaaccttctgtccatccgctgtaatcgcaatatcgacaaggcgtaagtcttgccgttcaccgcggatttttttcactaagtttctttcctgcagtaagttcaatttgcgcgtaattcccggataagacattttaaaagtttctgccaattgccctgacaactgagtgtcattaatcgttaattgttctaaaataataactcgtctaatcccagtccgtatcctcgacaaatcctactaagctgagccaaaacctcccgatagtcgatataccaccgacttaattcactttgcttattaatcaaaacgtcgaatcatcctatcaattaaattactcccctggctactagcgttttaaatagagataaaaattatatcaattaatcattgatgacattatatatacagtttatccttgtctctattgcaaacaatttaacatcagggttaattaattagcaatctaaacgtccaccagcgatattgctctgactaaactgtacatgatgagcacttgatttaatccccacatcacagtcaattaagagtttattaattttcaacttaaacgttctccttgatttgcttttttatcctacccaataatttcgctggttatactgttagcgtcattaactttataatcgtatgtattcactattttttaacgttcgtctctaattgccgaaagttatatgctgcatttctattgtaagtcaatcgttgtctaggttaacgtgtttccaaaactcattctacgccacaactaaattattagcaagttatctatttgatatttattcaccagttaacgcttatcgttcacgctattaactaaatggttagaaccagattataacttacaatctagccttaaaataaatgtctatttaaacctatttatgggcgataaaatagttataaattcaatcagtaacactgataaatgactagcttagtcctctttacaatctgctcacgagcgattaaacgaaattcataaaatgtaaatttattcattattcagtcaacatcaatttttttgagggcgctcattagaatcatataattaattttttattttcgctataaaatgccaaccatctgaccattatcgactattacaatcatcactagcagacatcaaattaatcgtttacaaattaataatataaagtagtatttcacattcttatattttataataaggataagaaattatttttataggaggagtagcatgccatctagacaaccgtcgtattcagccggtaaaattaatgcacgccgtcgtaatccggatttaccaactggcgatgtccaccacgacgccaataactggtttcaaagttcagccgttgaacagcatcccgtcacttttaagaatatctatgaaatgcaagtaactgctaacgtctttcttcccaaagactcgacggaaactgtttttccagcactaatcatcggtgctcccatcggtgccgttaaagaacaggcagctaacctatatgccattaagctcgctgaacaagggtttgtaaccgtttcatttgatcaatctgcttggggcgggagtaacggtgctctgcgcaacgcgattgcccctatcttatatgcggagaatttctcagcagccactgactacctaaccactctagactgtgtcgccaatgaccgtattggcttaatcgcaattggttcggccggtggtttcgcgctcaacgcactcaaaatagacgcacgtattaaagcacttgcaactattaacttaaccgatatgggtgccattattcgcgaacagcgtgatgcactaggcggcaacgcattaatcgaggaatcctcacgatcccggacattagagattgcaggtcaagcaaccacttacgcccatggagtacctgaagaactggacgaaaactcaactgatatcgaacgtgaattctacgacttttatcgtacccaacgtggcgcagccaactcgacactccatcccactcgtacaacttttactaaactattagatttctatccattgcgcgacctcgaaacgatcacagaacgtgccatgctctttgttgttggtgaagaggcatggtcacgacatttcagtgaagccgcctttgccagtgctaacgaatcaaaacagttattaaccgtaaaagcagctgggcatgtcgatttatatgatcgtatcgcgcttattcctttttcagaattaactcaatttttcaccaaaaatctataacaacgcaaaaaaataccactgacagcgaattgtcagcggtatttttatattatttatcattcaagtaggctttgactacctgataatttttgaagcccccactcaagttatacacggatttaaaaccgaggttcagaagtaaattctgagcagcattagccgtaacccctttattgcaataggtgacagttggaatatccatatctaattccgtgaaccgatcacgaatttcagcaagcggcatgttaatggcatgttcaacatgctcgtccgcatatttttgcttcgaacgtacgtccaaaatctggaagcgttcaccttcagccaagcgttgctccaattcagctggaggcaagagcggccgcccatgcaatgcattatcgagcgccattcccgtatagagcactggatccttagtggttgcatagagtggttgataagctagatcgagatggaataaatcggccaccttcgcacccaatgtgatggcagtcacgaaaacgtcaatccgcttatcaaccccatctttaccaatgatttgtacacctaataattttcccgtttgacggccagcaatggctttaatgacgttttcggttccatttaagtaatccgcatgccctggtttaatgttgtagagtacttccacatcatagtccttagctcgcgcgactgcttcagtaaacccagtctgtgcaatcgttgtatcgaacaaccgaacaatccccgttccaagaatcccgcggtgcgttaagccaccgccagtcaatgaattgccggcaattcgtcccattttattggcagtcgaacccattggtcgatacagtggtgagccatcaattacggagaaactctcaacaacatcgccgaccgcgtaaatattcggtacagtcgtcaacatttgttggtcgaccttcaacgcccctgaaggtcccttagctatcttcatatggtcgaccaactgcgtttgtggttcaacgccaagtgctagtaggaccaaatccgtttgaatggtcgtctgattactcaattctaccgccgataccacaccatcctgcgcagtcacttgttttgcggttacactctttaacacatgcaccccgttagcacgaataacttgttcagcacgataggccatatcaccatcaaaatgggtcataatttgcgcgcttcgttgaactaacgtcacgtccaagccacgtttttgaaattgttccatcatttcaagcccaacataaccggtcccaaaaatcgtcacattttgaactgaatggtgctgtaaatacgcgtcgattgcgcgtgtatctaccatgttatgcatcgtgaagacgttttggtaggcttcatcgaacggtgcaataatgcgtggcgtggcccccgtcgctaaaactaggcggtcataataatcttcaaacaactcgcccgtctcaaagtttttcaagaccagcgcttgttggttttcatcgattgaaatcacttcgatacccgtcataatgtcaacgttgaagcgttttttgaaccacgccgcatcgcgcggaattaacgtctctaggtcttcaacctcaccccctacgtaataaggcatgccgcaaaccgaataagaaatatcctgacctttttcataaacgacaatctcatcaacttcactatttcgccgcgcctttgctgccacactcgtccccgctgcaacggagccaatcacaacaatcttcatgatcatcaccaatccttattatatttaaagacaatataactcattttaatcttgaatgaaatccatttgttttcgactcccaaattgcaagaacaaattagccacacgataaatcctattaaatcagtattttcattaatattcatattttatggacttaacttaaccggcggaagcagcggagaaaagctctttgggtgtttgatagccagtttgccggcgcggtaaattgtttagctttgactcaactgcttggatatcatgaggacccaaaatatccatggatagacccttgggtacatcgcggcggatcattcgattatgcgcttcgttagtcccgcgctcagaggaacgagatggatgggcataataaaggtcagcgacaccggtaagtacagcgccaacttccgagaactcagcgccattatcggcagtaactgacttcatgattgatccgtattcttgacagatcttggccagctcatagttgactgaatcggcatcacgaccatctggatgtaagctgattcctgagacaacttttaagagagggtataatgaataaatcatctctcaaaaggaaggaatttttacatgccaactcgttacgacaaagaattcaaacaaaacattatcaacctatataagcaaggcgaatcagctgcccaactggccagagaatatggcattggctattcaacagttcataagtggatccagggccaggccaaaactcaatccggtaaatcgccagacgaaatcaaagcgatggaaaagcgactggcttcgctgtctgaggagaacgaaatcctaaaaaaagccctgggcttccttgcgcagaagtaaccaatatctttgattacattcaccaagaaagccatcaccactaggtaaccaagatgtgccgaatcctccgagtttcaaaggtcgatgacagtgggctcgattagcttcgtacttagcttgtgctgtttctggtgagtatacagcgtaatattggcgttgaccattcactttttttacttggtcgatctcgccgcggcacaattcattattgattgtttgatgacaaacattaagcgctctggcaattgcacgattggaatagccttggctgtgcatcgtagcaattctgcctcgttcaaacgaagttaggtgctgacctttttttctgactgtggtattctgttcttgcatcaagacaataacctctttcattgtttgtgtaggaacatcaatgataacagagattcgtcttggtgttttttattttatcaattagctaaaagtatttggctaacttgattataaaacgcgcgatttttatttggaggttcttattatgtttaatggtctattcaaagatctaacaccaagctcgtttacatcaggtcgtttactggtactgcgtcgagttattattagtatcgtgggtctctgtgtcttttcagctttctttattatctttggtgctaaagtaacttttgaaattcttgcaatatttgctcgagatacgactacatttgtcactgtgttgctttacttgctttcattatttatttttttaatcgggttcaaaaccaagattactcaaattagtgttgttacagcctggattagtgaagtacagtttttatttttgttattctcgccaatttggcaaattcacgctggaagagaagttgcgttctatgttgttttggctatgaggattctggtcacagtattactggcatttcttttgtatctatatcatcgcaacaataaagcaaatcgaaaataccgtcgacaacttaatacaaaaaaataggctagcccttgagggactagcctatttgaatatcatcaataaaaatcgcgttcaaattgcattaaatcattgattaaagacgctgcttgcttcaattcagcatctttatatttttcggtcaccttatcaataacttgcgctttcagcgtttcatgcattttatcgtggctttgcgcaatcacacggcctttagcggtcaaagaataatagatttttttctgatcatctggttttttagtcgcttgaattaagcccatttgaatcaacttcttagcggcgcgtgtaatgccgccacgcgtaaccgccaaccgatccgctagtgctacacctgttaattcttcggcctctaatcctgataatatgtgcaatgcaatgattgatagctgtggaatcatcgttttcaagttctcatcactcagctgattttgcaaccatttttgttcttgaacaccgcggccgttgacactatctgagcgtaattgcttgattgcatgatagagtgccatcactgattcgttttccatttgcttaacctctcatcaattgttaccaccagtatacaccaaattagaatactttagctttggtcgtcgcttccgttagggtccgtgctaatatttgttcacgttgatctgcatgagcatccgcgccttcaatatagacgtgttcaacttgattaacaccatagaatttcaacatattggttaaatacatatcgcctaaatccataagtgcagaactttcgttactcttaatcttaaataaacggcggaacaagaacttaacgatcccccacttgcccccagcgtgataaacactgccagctgcttggatatggattgctttcttaccttctaacaaacctactgaaccgttcggtgtgtatttgaatgttttgtgggcgaccgccgtcaaatctaaatattgtttcatctcagctggtaaaaaatgattgtacattggattgatgaagacatatttatcagcttcgataaattcatctaaccaatctgcgtgttgttgtaatagtgttttctcagcttcagccattggttcgtcaaatttttgtttacgccatgcagccattgtcatatcgttcaatggtggaacacctgcttcagtatatagatctcgaataataatttgatcatcaggatgggtccgacgataagtttctacaaagcgggtccctaccgctagggataaactcttttcaacatggggatgtgcttggattactaataatgtactcatttaaaaaaaccttttttagtttcgtttagttgcttgtcaacaaaataaagattatcatctttttagttgcttgtcaacaaaatgttttaaattaccgttagctatcaaatttagctgaagtgtcctagtagcgccctaacgtgtcatttttaagcaaaaaaataggctaatcccctgcgggactagcctatttgagtaagcttattaaacatgctttttaaagctgactcctgcgcttagctacaatccgcaaacaatcgactaacgtcgattattcacgaatttaggctaatgctcagaatcaacccgctttaaacacactctttaataattagtttaatttcttcttgcttacaacattcaagttttcgtctaaatcataaacaactggttcgcctgttgccatttcaacgtccatgatgtcttcatcagagatgttttcgatgtattttgttaaggcgcgtagtgagttaccgtgagcggctacaatgatattttggccgtcgattaattttggagcgatttcgtcttcccagaatgggataacacgttccaaagtaaccttcaagttttcgccaccaggaattgcttttggatctaagtgtgcgtaacgacggtcgtttgctgctgaaccttcatcacttgcatccaatagtggaggaagtgtgtcgtatgaacgacgccagatgtgaacttgttcgtcgccccatttttcagctgcttcagctttgttttgaccttgtaatgcaccataatgacgttcgtttaagcgccatgatttcatttctggaacccataattgatctgaaccttcaagtgcatagtgtaatgtcttgatggcacgagtcaatactgatgtgtaagcttggtcaaaaaggatgccttcttttttcaataaagcaccagcgttttgagcttggcgtacgccttcttcgcttaagttaacatcaacccaaccagtgaattggtttgataagttccattcactttgtccgtgacgaataaaaactaatttagccatgtgtaagtaacctcactttttttatttttactctgttcattttacactgtttgctacacaatttacagtcttatcttttcagaaaataatgaaccttctttttttatgctcgatcagtcgttttcgtttctttcaataagaaaagcgccgccaagatggcaatcaccatgagcactagcgacgtcgttacaacagcgatcatccctttatcaaaagccgtgacaacaacttgttggacctttgcggcatacggtgtcttcactaattgttgcccccacgcgattgcatgtcctgaaaaagcacctgcttcaaccaatgcttgctgaatgccagttgctgccgccttcgggattgagctgccactaaagctagtcttcaaactcgtttcgtaggcattcgtttgtgataaaccgagaatcacaacaccgacggtaattccaatttggcggaaaacattcaataaaccggatgccattccgatttcttgaggattaatattatccatcgccgctgtattgatcattggattgataatcgcattgcctaacccagttagcgcaagcaatggtaataattgcatataagtaaaatcagtcgttgtcacttgtctaaaaattaataaaccaagggcagaaacagtaaatccaaaagcaatcaaccattttttaccgaatttatagcctagaacacccgtgaatggtcctaaaacaagggaccataaactcattggcagttgatgcacaccggttgaaaaggctgagtaacccatgtaattttgcatcaaactcgtttgataagcggctaaggcaaaaataccagcgcctaatgagaaagctaaaatcacaacacccacgaaatggcgattcgtaagtaacgtcaagttcatcattggtgcttttgctttcaattccacaaagacgaaaagcgctaaaattaaaacggaagcaactaaccaccccataatgcgcatatctgtccaatcccagtgcatatgttgttctttttgaatcaacccataaatcccggagaataaaccaattgctgacaagatcatccccataaaatcgattgattcgcccgcgccataagctggtgtttctttaacattgcgaatcactaagtaaactgaaataatcccgactggtaaattgacgaaaaagatggatggccagccgaagttttcgactaaaaagccccctactaagggtccaatagcagttgaaaaaccaatcacggagcctaaaatccccagtgcagtcccccgttcacgcccttcaaagttcgacgccactagtgccatcgataaactcatcatacccgagccaccaatcgcttggaccgcgcgcccgatatctaataccaataaatttggtgccagtccattaacgacagaggccgctgtgaataaaatcatactcatgataaaaattttcttgcgcccgaacatgtcccctaatttggaaacaatcaacaagctgaccgcgtacatcaacgtataagcgttcaaaacccattgtaagttgctaaaagttgttttaaaatcaatcgccatacttggtaaagcgacattgacgacagttacgtctagcaatcccataaagacacccagactcatcgcgaccagcgctatccagcggttggttgtttttttcattttactatctccattttctctatctcatttatttgtgcttgtagccaatccattttggctttgatcgttgtgattacgaaatcggttgaacgaatctgccaataataataatccgtcattgtctcatccgcatcttttaattcagttagatgtttttccacaccgctataaacatgtaaatcttcagccaactcactgtagaaatcttgtaaaatgctgacttgttctgctgcatcaatgtagtgcatcccccgcatcttaaaacgataagcatcatcccacttcgcatcatgaacgactggtttagccattaattcagcaaaatagcgccgtccctcttcagtaatgtgcgcaatcttcgtaccacgtgaatcctgatcagcttcctcaaacccaatgcagcctttgctttccaatttatctaacaacggatacaaaaccccatttgaaattttccgtctgggtaccatcgcattttccaagataatccgcaacttatagcccgacatattccggctcattaaggcggataacatcagcaattcatacataaacgcataacctctctctttaatcagtcttttagacaggtctttaagacttattaagtctagttctttccgacatatttacaagcctttttttcatttttagacaaataaaaaaacatgatccgcataagttgcctgataacaaggcttcatgcggatcacgcttttatggatttagggatgtataggttgtacactctctctttcaactaattcaattgaaagtactttttgttgtggcgcaatagcaggctccacaatccggttcaataatagacgtgttgcttcttgcccaagctcgaaaatcggttgcttaatggtcgtcaattttggtgtgacatattcacaccaatcgatgttatcatagccaatcactgagatatcttctggcacctgtactcgtaattcacgtaacccacgaatcaatccgatagcgagttcatcattgattgcaaatacagcagttaccccgctatcaatcacctgtcgtgcaacttggtaaccacctaatttcgttaacggtgtcgttatttgccactcatccgccactggtaattgggctttcaacatcgcggcttgataaccaatgaatcgttgttcgatgttccaagctcgttgttctggtaaaacaattccgactttatgatggcctcgttcaatgagataccgtgcggccaactctccaccttgcgtatcggcaaccgtaatttcatctcccgcatgttgtttatctgattgatctaataagataaacgggatttgtcgtttttgcagatagctatccaacgttgttttttgtaaatgagggacagccaaaataaagccgtcaacatttcgacgaaccaattcctttaaataatgatcaactttctgattatgcgcccctgcactataaattaatgggatgaaatcgaattgataggcaatttcttcgacaccttgaataaactgactaaaaaaaggattattgatatccggcaccaataccgcgatcgtcttcgtttctttattaatcatattttgcgcgaaataatcaggttcatactgaagtctttcccgagcggctttgacccgcgcaatcgtttctgcgctaaagcgctcacctttattattaagaattaacgaaactgttgtgaccgatgtttgcgccagcgcggcaacatctttaatcgttacttttcgaaccattttggcactcccccgaatcaaattaataaaaacacccacagccggctagccatggacgctgttaatatgattataactgaatatccttttcataaggaatcgaattttgcgcccctttagtttggactgcaatcgaagaagccttattggcataagtcattgctgcttcaatgttactgtaatccaattcaagtttcgtacttaaagcaccgataaaggtatcaccagcagcggttgtatcgactgcttgaactttaaatgccggtacaaacccggttgttgttggtgttgcatagaatgaaccctttgccccaaccgtaatgataacgactttaatccccatcttaaacatcgcttccacgttagctttcattgatgcttcgtcagtcactttaatccctgtgataatttcagcttccgtttcattagggacaatcatgtccgtcactgccaataattcagctggaatatttttaatcgctggtgcagggttcaaaatcgtttgaacgccgtttgaacgggcaattttgaaagcttcaataattgcaggaataggtacttcgaattgagcgacaattctgtcagcatctttgatggcttcttcggcttcatgaatatcatcgactgtcacatcttggttggccccaccatagattaaaatactattttgtccactagcatccaccatgatgtaagcttggccagtcccagctgtttcagaacaacgaacgtgatcaatgttcatgccatcttttttgaacgtatctagcatgaaatcagcggcgccttccttaccaaccttactaatgaaagctgtttgcgcacctgaccgaacagctgcgattgcttggtttgcacccttaccaccaccagcaactgcgcggccatccattgctaatgtttcacctggttgtggaaaacgctgaacgtttaaaattgtgtcgacatttgttgaccctaatacgattacttttttcatttgaaagccctcctaatggttaaaatacaacgccactttctaaaataatgttggaataaggtgtcatttcacccgtccgaacaaatgctttggcctgccccaagtcctgtttcatttgtgcgtgatcaataaattcaatgggcgtctcaccaatcacttttttgatttgttcaagttgtgctggattagctgttttaatttcgtttgctaagtaaactttttgaatttccaattctgttagaacatttttaagtacttgaataaaacttggtacaccattttcgatggccacatcgattttttgcgttccagctgggaccggcatcccagcatcgccaatactcattgtatcaaaatgccccatgtttgaaatcacatttgaaatttgtgaattgataacttgtgtttttcgcataataaatccgccccactttttatttgataaaggctgtcacagatccagccactaatacgagtactaaaccaattaatacggcaaccatttcttttttagtcttttgttctttcaacacataaatcccaccgattgtggcgaaaatgacactggtttgggataaaacaaaccccgttgctaagccattcacagaaggttgtgctgagataagatacgtcagcgctgcaaacgcgaagaagaacccactgaagatattcttatacgaagttgcttctttgaaaggttgataagtcttgctggtttgggttaatccgaagataacacctacaattgccattcctaatgcttgtggcaaaaagccttggaaaccgtccgcgtgtactgcttgtggaaaggcggagtaccctaggtagcctagttcgccaactaataataacaagatgccacgcaccgcgccatttttactagcgcttgaacgatcttcactccaggctgttaaataaacaccaaggataattagaataatcgctgtgaacccaatcaacttcgattgtgtacttgcccagttacccaagatgaagacgccccacaaagatgccccaacaagttggaacccagttgtgattggcatcgttctagaaacacccatggtttcaaaaacatgaaaggtgataatctgcgctaatgcccaacaagcccctgaaattaaacaaaaaataaatgttttggtttctggaatcggtgtcccgcggaaaatagccacaataatggccagaattaatgtcccaaatgtcgttccaataatttgactcgctggtttcccaccaattttaccaacgatcacagggaacaatccccaaccaatcatcggcattaatccaattaagatattgacagcattcatattcaatcctccgtcctttattgtaggctagtaaaacgttttactaactatcatggtgattattataaaggagcttctttgagaattcaactcttttttgtaaccgctttattaaagaacacaaaaaagattaatctggcgcgcatttggcctgattaatctttttttaatttattttttctttgcttgtccgtatcctcgtttagatttataacctgcatctaaaatttgacacatttcaacataatgccgttgctgtgtttcttcagctttagcgccgtaaacataacgtgcccattcgcgttgatagcctggtgttagtgcgtcgaaaaaggtttttgtggctggtgtatcttctaatcgagcactcaatcgggcaatctcaacttcatattctgataatggtttttgtggcatggtgcataactcccttattttaaccgcataacatctctggcaatcatcaactcttcattagttggcacaatcaggaccctaacgcgtgattgatcactgctgataatgcgttcttggctgcggacattatttttatcttcatccaattctacaccaaaacaagcgagtcgttcacaaatggcagcccgtaattcactgccgttctcaccactaccggcagtaaagaccagcgtatctactccattcattaaagctacgtaagaaccgacatacttcacaactcgattgacaaaaatatcaagcgccaattgggattgtggtcgtgagtcagcggtttcttctaaatcacgcatatccggtgatagttcagaaatccctaataagccagacttatggttcaaaattgtgatcatctctggcattgtcttacctaatttttcagctaaaaaggctactaatgagacatcaatatcaccagatcgcgtgcccatcgtaatccccgcaagtggtgtgaaccccattgatgtatcgacagcgtgcccgtcttgaatcgcggtaattgatgcaccactgcccaagtgcaacgtgatcattttttgcgtttcaagcggctgatctagcatttcagccgctcgatgagcaacaaaccgatgactggtcccatgcgcaccgtatttacgggccccatacttttcataatacgcttgcggaatactgtataaatagttttcggcaggtaacgtactgtaaaatgacgtgtcaaaaacagccacttccggtacgcctggcaataatgcagtgaaaattttaatgtaataagcttgggttggattatgcaacggtgcatattcagccaaacgattaatctcatcgagcccaaccggattaattactgcagagtccttgaaggcttctccaccagcaaccacccggtgaccaacccccgtaatctcatcgagatgggttacgatatttaattccttcaaccgcgttaataataacgttgctgcttgttcgtgcgtcgtaatatcttggacttgtttaaacttttcctgattgccatacttcactgtgaatacagaatcagataagcctaaccgatcaatcattcctttagcgattactcgttcagacggcatttcaaataattgccacttcagtgttgaactacctgcattaatagccagaattttttccatgatatcgactcccactctttcataatccgttcatggcttaattgtaagcaatttcataaaaagaaacaagccctattatatcagagtgcgtcatcaacgggtaacttctgagcatttatctaacttagcgaattggcgatgcaatcgccgatttgataagtgtagcaaagcacaggaagttattgatgaaagcacgtttaaggcaagaatgcatttggttgcggtcagcaactgagcattaatacaaactagcgcttaatctcgattttaagattaagtgctagtttagattaagcggaagttgttgcaacaaaaaagcacgttttatccataaaaaaagaaccgcccccacgcggttcttcctatttcataataactattctgcactttcttcgttcattttctttactttatttaggaatgaacggcccatcttgttatcttggtattcacttggttcaatgacatctaaatagaattgatcaatgaatcgaatcaaaccatcgactttatcacggcccatttgtgcttcgatttcacggtatttttcaacatagcggctcaccaaccggtctaaaacgtcttgaccttgtttagttaagctcaaaaatttaacccgttgatctgtttgaagatgttcttcaaccacgtacccattttctttcagtaaccgacattggcgtgaaattgctgaacgactaacactcatcgtcttagctaacttactacctgttaagttttcgttagttgaaatttcgtacataattaaaaattggtcaaaagaaactttgtaatttaaactttctccactgacaaagtcgcttaaattgctgacaatccaccgataaatcaatgaaagatgcgttactacttcccaatcatcagaatacttgcttgttgcttttgctgtcataaccttttctccttttactaaccaatctgtcatgcgtagaaacaattaatgggtttaatttattttgctatcaatatattagcatattttgagagaaaagaaaccactcgattcattaaatagctataaatagatttgatgtgcaacaattcaattgaccatataatcatcaccccactatattagtttgtcgtgactatataaaaagaagtcattaaagataaaattattttcatccttaataacttcttttaataacatcttataggttacgatccatattgaacgtcaatttcgataaattaatgcccgacataacgagttccccaatcaccgaggtcgcttcagtcgccatctgcttaacaatcgcatggttttgctcagtcaaatactccgttaaggcagcgccttgatacttttgtgcttccacttgaatggcttcaatcatcgttcgcaattcttgcttacaacggtttaagtaatctacattgccttgaatgtgctggctataatggccttccaccaatactgaaattgtccggtataaccaatatgcactcttcatatcccatttcattggtgtttcgctgaaacttagatccgtatcgttcgcattcgtgaaaaatggaatgaacggtgtatacgttggcatccccattgtgatccacatgatggccgcttgttcctttggcacatcattccgtaattgtaaaatatgtgcattttgcgtccgattcaaaccgattgggcggtaacgatacttgtcggcatcagtcccatgccccattggatcgaatggcgtttcattataatgtgagcctaacaacatttcaatatcttcaacactaattttatgttcaatacgccgaataaatggtaattcagccgattcgggtgacatatcaaaatcagcatcaaataaatgatgggcgtaccaaacccgtggtgtattatagtgccggtctttttcattcatcgtgccaaaaatgtggcggaaattccagcccgttttatccggattcaaatgatgggcttcaacgtattcttgaatgccttctgcccacataaaattgtcggcatccgtgaaatcaacttgttgaatcgccacttggttggcggcaactgcataagcatcatctggaatccgttgtgctagccataaatgccctgtcacaatttccatataccacacttcattgtgatcactaaagagcacactattgccggcgggtgagccgtattgtttaatcaaattaccgagatagctgaccccttcgcgcgccgagttaatgtacggcgcaaccatagcttgcatgcaatcttcatccaacccgtctttcaccaatggatcataagcgagggctttttcatttccatatgtactttcggtacagctcatcgccacgttaacttcgttaatactactttcatcataataaccattatgtctgtaatcaacattcggaacagcgggccatcggtagccattctcaggtaattcggcttcaaacccgtttaaccaagatttaattttagcacccttacgccctttaacagctggattgatgtgaaaccgttgtggtgttaaaggtaaaaaagtatcgtcgttacgcgcaatcatcgttgatccgtccaatgatgcgtttttaccaactaaaattgatgtacatgctgattccataagttgcactccctctgatgaccactttaattgaactcatcggtcacgtttgattaaaattttctcataattaatatccatagtgtacgcttctcacttgcgaaagtatagcctgatttgttgattaatttcctttaacccccgcatttattgcgatttctatacaatattggatttcacgttaatttccgatttcggaattatcgtcaaacgaccatgttagcgctcctaatttcatgatatattattagatgaataactaacaacaaggtggtttctcaatgaaaaaattaacacttgctctgttgctgaccatgaccagctgtttcatgattctagctggctgtcagaataaagcagaaattccagctgccgcaactaaaacagaagaaaaaattgatcaatacgtccaaaaagtgaaccaactctatagtgatggttcccgtaaagatcctgcgaagttaacagccgataaacaacaccaaattatcactgtggctgacaaactcgacaaacaaatcacgcccaacctttatatgagcggaattagcgctgatgcaaaggctgattacaaggctgcccaaaaagatctagataagattactggtaagcaaccagcaactagtgaatctgaaagtgttgcttctgaaaagcctgctaaaaagaagaaaaagaacaaagttaaaacaagcgcctttttcgataaagatgggattgtcaaagccgatgcacaacttggtgaagaaacggactataccgaccaccccaaacaacttgctgattatcaagaagctaaaaatcaattagcggctatggcagctgtccggaacttatttacagacgacaacctcaagcatattccagctaacctatctgctagcgacttcccttacgtccgagctttgattaataaatcaacccatgacggctttaaagaaaagtacttggcgtatgttaagaacgctgaaaatcaatacaacacttactctaacaatacccaagcggcaaccacgcaaaacacaacaaccgctaatcaagcaacaactaaccaaaacacagctaccaatacacaaactacgacaggctatgctgctaacacggcaacggggaatggcactggtgcaacaactggaactgggacggggacttcgacaacggataccacaaccggaaccgggacgactggtacacaaagtaatactcagaccggtacagatcagacacaaaccggtacactccaataatcttaagacacttcctaaaaagtacgctatcttcttgatatgcgtgcttttttgacgttcgcttacgtttagtcttttaatcgccgatatcttaagaaacatgtaacagcgcgctaactattatgtaacatgtttgttactttcagatgctatgctaatcagcgtactaaattaattcaaaattcaaacaacttaaaaaaatttttcgaaggagcacaacaaacacatgaaaaaacaaaaaatgacttacttatcttctggaatggttggccttgccggcttagtattgatgggtcttcaaacaaatgatgcccaagctgcaacaaatggtacggttaactacgctgacggggcaacaaccgtttggactagcccagcagtaggtcaaaaacctgctcgttacttggcaactaaccaacaagtaacaatccaagacacaaaacaagtttacggccaaacatggtacaaacttggtaatgacgaatgggtttcaagccaattcattacagccggcgatgcaactgctcaaccagctgcaacaacaaccgctgttaagaacacagtaacagctaacttccaatcaggtgcaacaactgtttgggctgacacaactgctgctcaaccaactggcgaatacttaacatatggcacaactaaaaacgtcattgatcaaaaagatttaaacggcacaacttggtaccaattagaaagcaaaggttggattcctgctagctacgttgttttaaacaaccctaacttggatggtgtcacaccaattacaaatgcacctgcagtgacaccagttgctgcaacaaccactacaactgaagttcaagcaccaactgctcctcaagcaacaacgccggcacctgctacagaaacaccagcgcctgctgcaacaactgaagcaacaacccctgctgctacaacaagtacaccagcagcaacaacacaacctgctcaaacacaaacaacaacgacaactcaaagcagccaacaaacaactcaagctgcaacaactcaacaagcaccacaaacgaatacaacgacaaaagcaagtggtaacgcacaaactgttatcaacgctgctttatcacaaattggtacaccttacgtatggggaggctcaacacctggtgttggtcttgactgttctggtttagtgcaatacgcatacgcacaagctggcgtttcattgggccgtgtcacaactgctcaagaaggtgctggccaacgcgtctcacttgataacttacaacctggcgatatcctcttctggggtggcgctggtgcttcataccacgacgcaatctacatcggtggtggccaatacgtccacgcaccacaacctggcgaatcagttaagacagcaagtatctcaagttacttcatgccttcattcgcagtccgcgtactttaatcaaaaaatcccctctaatatatttctattagaggggattttttaattaaatattttttgtcgtatggctggcggctttaatttattttgctgccgttgtactatctgttgatgctgcttcagtcaacttcactgttgatttcttcaattcaccattatgataatactgaatttcaaccgtactattcatatcgtaactgtaaagtgtcgtgtgtaaatcagcaacacttgtgacatccttgccacctaaaccaacaatgacgtcgtatttactaatccctgccttcttagcaactgagttggcattgactgatgcaacaactaccccactcttcacagaggttggtaatttcaagactgatgattgttgcgttgatgaaacattcgtcaaatcgatgacgctaatcccaagcgctggtcgaacaactttcccatttgcaaccaattggttaataattttgaccacttcgttacttggaatggcaaagcccatcccttcaaccgttgtgctcccgttagaagctaacttcattgaattgatcccgatgacttgtcctgcaaggttaactagcggaccacctgaattcccagggttaatcgctgtatcagtttgaataacggttgcttggccagtcgcttgaccggttgtttcatccgtcacatcaatcgtccgtttctttgctgaaataatcccttgggtaacagaagtagcatattctgagcctaaaggcgaaccaatcgcgagcactgattcaccaggtttaatgctgtcagaatcaccaaacgttgcggtcttcgtcactttggcactatcaatctttaaaacggctaaatcagaaacggcatccgttccgactaagctagcatcaatttttgtgccatcactaaggatgacttccaacttatctgagccagaaacaacgtgattgttcgtgacaatgtaggctttaccatctttcttttcgtagattaaacctgagccttcactcgattcttcaagctcactactactactttttttattggtactatccgcgccaaagagcgcactcaaatcgcctgaattatcttgttgtttttgcaagttaacaactgacacaaccgctttgttgaccttattaaaggcagttgttgtttgtgaagatgagttgactttgatattactaattttagtggcacctgctttagttggtacttgggcagtgcttgagacagtgttacttcccatctttgaaccggcataaccagcaacgccaccaccgattagtgctgcgataacggcaacaacagccgttttcattaatcctgaattctgattcatactaattcacccaaactttctaataaattctgtttattgattatctctatcatagaatgtaaatttgaaaaaattatgaacaagttacgaatattaaattgtttttctaatccgcattttagcgaacttatttcgcaaaaacaactaaaatgtcttctattcagtctaattacacggcaaacaatggatcagcaactgccggatcagtatctagaatttcaaagtctgttcccaccccataatcatgttcctttaagatcgacgcaaccgtcaaatgggccagttccttcatgttattttcttgactcaagtggcctaggaaaacgcgtttagtctggttccccataaacgacatcaaagcggatgccccatcttcattcgataaatggccggtatcactgagaatccgttgtttcaatgaccaaggatactttcccatccgaagcatctctaaatcgtggttgcattccactaaataagcatccgcattttcaattgtcccacgcacttgatcagagacataacccgtatcggtcaggattgcaaaggcacggttattatgatggaattggtagaattgggcagcagccgcatcatgtgacaccccataactttcaatatctaaatcaccaactgacaaggtactacccatttcaaaaatgtgcttgtgttcagcaggcacttcaccaataatcgaagccatcgcatcccatgttggttgatttgcgtacacgtctattccgtatcgccgggccaaaacaccgacaccactactatgatcgcgatgctcatgggtcactaataaactgtccacatctttaagatcgcggccaatactatgcattaaatcttgcacacgtttcccactcattcctgcatcgactaacactttatgattaggtgtttcaatatacgttgtgttgccagaactactgcttgcgagcacgctgacttgcattgcgtctttttctaccatgttttgctctatccccttggtctctttctaaaacaactaaatttcactacggttcttcatcagcgcaccggtaaaggcgttaatccgcttaacgacgacactcttagaattcttattctcaatggccacttgccaagctggcacgtacaccgtactactattggcgtccaacaaagcactgtatccgagtttcacccacataatgcgtgagttattcggaatctcattatctgtatataaatcaatgaccgcgtcttgagcagtcaccttcgtactttctttttcacgcaaaacttgaatcttattcgtgtaagtttgcgtgtaatgactaatctgcccgtcttctaatgtaaaaatcaactgaccatgttcatccatgatctgcccgcctgggactttttgcacatatacgacttgttgatcactcgataatgcgtgtgaatagcggtagtcctccgcttgaatcacgttgtctggttccttcataaaggccgccacggctaagcgttggttcccttttttgtaagtcagtggtttatccaattcactcgtcagtgtcatgcgcgctttatcaaacgaaacagtttgaccggttagtttggcactcgccgtttctaataatgtctgatctttttgtcggctggctaaataataaccatccgttcggcgcttggagagtttcttcactgaaatttgatcgtcttttaaatccttcataatctggctagtctgtgaaccactagtaatcgccgtcgacgttattgtctgactgcctttcagcgaggcaaataaatagatatccagcgcaataaaaatggcgataaaaatcatttcaattctgcgaaaatccattcatctaactcccttcggttaattcagctttttgcgccatcaatgcggataagctacgccaaacccctttatactgtacaaagtaggttggatttaaatcaatcacttgttcgttactggtttctttggtccattcataaccgacttgcacgttttccacattttctagcaagaaaccattacttgtcaattgattcaaaacagactcggtacttggcaatgtgacttgcttgtcttcagcaggaacgggtacttgcaaactataatttgaaaaatcaatcttttggccagttggtaagaattgtactttcacgctcccaaagttagtctgataaaagactgggaatccttcaacgtaggtccgataagcagtcgaattcgttgctttatcataactatagaaacgcatccctgaaagggcgttacctgtctttgaaagcgcatcaaaactggcttcaaaactctttgttaatgtgcttggtgatttctcattttcatacttcacaaacgaaatttcaccggtatcatggttgatcgttaggcgtttatacaaattgctgtccgtcccatccgtataaatcgcactattgccttgttctttcgtatcaatattatccgtattttgttgattcaacagcgttgtgatgtaataattttcgggttgttgattaactaaataactataaggcaacaacgtttgatccgctgccacatagagtaatggcttgtgattcaacattttttcggtcactttcaaatgcacatcggcatttttaagcacctttttcacacgagcttgtgaaaaaacattgagtgtcgtttggtacacttgatgactttgatcattcatcaaccacaacttaggctgtgtgcccaacgtgattcgaatccgattgaatgtcacgttttgacctaaattattattctgataactgaagacctttttaaaaatagcgtacgaaatattatcaggatataaaagggtcaatgtatgatcctcactaattgcctggtaataatcgtcttcgcttagcttaacttgcttaaactgtgccgacttggcaagctttaaagtcgctttaaactgtggaatcaaactctcttttgagttataaatcaactgactctgattgtctgtccgccacaatagttgcgtcggcaagaagatatcaccgatttttcgttctgtcttacgacttgttgacttagtggtggtttgactgtccgtttggcgctcataatgcgcgttactggtccagattagccatgatagcccgatactgacgataatggcagcaatcagtataacgcgcattaaaaagttattaaatcgcatcccactcacctccatcagaatcaattggttcatatggcaacgaaatgtagaatgtcgagcctttaccttcttggctatcaacccaaacacgcccacgatgcgcttcgatcacttctttagaaattgccaagcctaaaccagtcccgccttgtttacgagaacgggccttatcaacccggtagaagcgatcaaagatcttaccaaggtctttccgtggaatccctaatccttgatcagagatgcttaaaatcacgtgacgatgtgtttccaataagcgacacgtaatcacgccaccatctggtgaatatttaatcgcattattcatgatattatcgatcacctgcataaatttatcggtatcaatttcaacccataaatcccgcttagtgaagtctcgtgtaatactgtacttcttattcggatcatctgttggcaatttgcccgtgctggttgtcagtttaggcaaatcatctttgtgctcttgatcccgcttgatcatcatatcaaaccgatccagtgcatacccaaagaactcgtttaaattaacatattcgagattcatctttgccgttccttgatccattcgtgacaaactcaatagatcattgatcattcgaatcatccgatcagtttcttcttgggtcacctttaagaaattgggcgctagctctggatcttgccatgcgccatcattcagcgcttcaatatagctccgcacgcttgttaatggcgtccgcaattcgtgagacacattcgaaacgaattcgcgctgttcttgttcattcttttgttgttcggtgacgtcgtggagcacacaaactaaaccggtgatatagccggtttctttttgaattaatgaaaaatcaacatgcaagattaagtcgtgatcttgttgttctgagaaatccaagaccatttcctgttgcgtttctaatagatcgcgcaaagaatattcatcactgattcgtaaaactttaagcaatgactggcccagtaactcatcgcgtgtcacatttaaaaaatcttggccagtttcattgataatcgtgatattgcctcgtcgatcagtcgcaatgaccccatcagtcatatgactgagcacactatcaagtcgccgtcgttccgactctgacgcttcttgcgcctcttcaacccggactgataagttattgaccgcaatcgcgagttgccccagttcatcttgaccataaatcttaacttgcccagagtaatccccacgcgccatttgaatcgcttgtttcttcatttcatcaattggtcgggtaattgcccgggaaataacaatcgataatgccatccctaataaaccagcgactaaagacgaggttaagaaaatgacggtaatcgacgaaatccccttgtaaacatcttccatactagcccgaatataaacggcgcccacaacggtattactatccccacttgggttcgtcaacggttggatcgctgtataatagctccctagactctcattgtatgccacttcttgttcggtatgcccagagtaaataacctgtttcacccgtgggttacgcgtcttttgaccaacggtactttgattattcaagttcgtgacacctcgaatggtgcccttattatcgacaacttgaatttcggcagaattgcccatatcgccaataatctctttaatattcttgttcgcattaccactattattcagtaactcattactaagttggttttgaatataggatgtcacttgtaaggattgcttaaaatcacgcacattctgatattccagttgcttcacaaaagaagcgccgataacttccaacgttaccagcagcaacaatacgaacacaatggcaattttaaaatgaatcgattgtagcaaccgaattttcttattcatgcggcaaatttactcctgctcaggatttcttaagtagtaaccaacaccccggcgtgtcactaaccattctgggtggctggggttgtcttcaattttttcacgtaaacggcggaccgtcacatcgactgtccggacatcaccgaagtaatcatatccccaaaccgtttgtaacaagtgttcacgggtcatcacttggccgatatgcttggctaaataatgtaacaattcaaattcacgatgcgttaattcaatcttgtcgccccgttttgacacaatataagcatcaggatggatcgttaaatccccgatgttaatctcgtgattttcttcattcgcttctttatctgattgactcgttgtaccttgccggcgtaggttagccttaactcgcgccactaattctcgatttgagaatggtttcgtcacataatcatcggcaccgagttcgaggccaatcactttatcgatttcagaatctttagccgtcaccataataattggcatatcatgcgatttacgcacttggcgggctacttctagcccatcaatcttcggtaacatcagatctaatagaattaaatctgggacagcctcttcaacttgttgtaaggcttcttcaccatcataagccgtgtagacttcgtaaccctctttggttagattaaatttaacaatgtcagagatcggtttttcatcatcaacgactagtatttttttagccatgtacggatcctccttgaatgtggatgctttgccttctattatactcattttcagaaggcaattcaaaattaggtcaattcctaccaactggattaacggcattgttaatccctataacgattaattcttacgcgctcagtaactttattcaaaaaaaatacaaataactgtttacaaaagtttgtttaatatgctatgatatttaagtcgtaaggcgagacatcatatgggtggttagctcagctggcagagcaacggactcttaatccgtgggtccagggttcgatcccctgaccacccatcaagtatacatgataagtcgttatagaagtgcttaggcattgatataacggcttttttatttcttcttagcagattattattcacagtgaatacgacaaaccgtattcaaacccgtattcacgtattcaacaaaaatcacgcacggggcatatacataacttactgcaggcggtcagattagtggccgttttttaatttggactaacttcattagccaacgatttaagttaaacatagactgttaaaaacatactagcaaccattagcattcatttttattaaatttatggtttccgtcgtaaatcgcgactgtattcattagataagggggtgcctccagttttggacagacgtttcaaacgggcccaagtttagcttggttgtatttttcgacctagataatatctaggggtaacgtttcgttactccatatgtttctatatcaaaacacatctgctcaagcttgagccaatttatatctaattgagtagcacggaattttccgctgtactcattttattttgacctaatagaacgatctgttatggcaggttatttcacggttcgacaaaccgccctattttagggcctcctttttctaaactaccgtttcggtacctcagattgcttccatgcaattagccgaaaccaaagatggattgggcaacatctcgttaaaatcaacggtatctaaagttaattagggccgaattttcggccgtactgtttctataattggctaagtatctgacgcaccatatcagtgcattagatgctgttgtaatatactaactcatctttaaggagtcatcaattcggtgactccttctttagggcctctaaaatctctaaataaattaatgttaggttttgttaggttttatgtccaacaaaagctaattcacgtaggtttacattggataaaccaataatggcttgtcctattcaattactaatccataaactagcctgcgaaattttgcgcaacctacttataaacaagcaactcttgattattatagctttcggcaaaagctaataacgccctattcttaaaccgattataactagacctgctataccccatcgtatccgctatatattgccttgttttatgactaccgtctaagtaacacatattaataatggatgcttgcgtatcctccattcctcctacaaccgcttgaatacactttaaatcacgcttagcctgctcatgtaagggatgactagtatttaccgtggctagccgtctaatcgtgccatagctctttaacagctttctggcgtttttgatacttgcttgttggtttattcggtcaatgatcatactgcttcactccttaagtattaattcaattttgatggcatcctaaatcaggactgcatccccgttatcaatgcttcttgaatattaataagccttcactagggtaggactcggaaaactctagcaaagcctgtttcttatgcttcttgaatgatgatgctgttatacctagttcatcgcagatatatgacacggttagtttaccagcgcttaaatactgcagctttagcagttccctgttaatcaccgttagcttacttaaagccacgtctatgtattctagggtctgccgtgcctcgagtgttttaatcgctcgtttctcggttgcgttcccaccgttaaaagactttggtgtatgactataagaaggactttttaagctgctggtacttgtcacagcgtgctttaaatgccaatattttattaataactcatctgcttgctgtctactcttatcctcgtcaatatcaaaatcaaacagtttactcacatcccaactctaagtttttctaagttcttccaatattaaaaagggacgcaccaccgctatttactagcagtaacgcatccctttggttttccaatcaggtattaaactaatttagtcttgtctgttcgttcaatgaacaccaccttattattttgagttgtaacagttaagctcccataacttggtaactgatattctttgctttgctgttgatccgtaataataattttgaccatcatatcacctctaaatatcaatcccaaattcttcagttagttgatgatgtttagcgaattccttgccacggtcgggcgtaatcgtacccaagtgttctggtggcagatcttttagtagtcttcgaatagtagtggtcacactggctgagtttttcttagctgctttgtgcattattaagtatcttgaacaacggtcaaccattgtgaccacacaagatctgccagttttgccagctacagtatccagctcccagtggccaatctgagtccgcttattggcagactcaggtcgttcttggagtgtatgcgatataggaatcttcccgcgacgttcctcataaccttttttatggcgcgatttaccatgatgtctaagctttctgatcacccctctggcacctcgtgatgaaagcttctgatcaaataaaccggagtagatgccacgataaatcgtggtgtagctgatctgaaatgatgaggtctctaattttaagcgtgcggcaatttcttctggtgaccattgtagatccaagaataaatgccggattaattgaagcaattggtgatcagaaagtagcgaccggcgtccacaatgagatttttgagcttcgtagcgctcttgagcaacagaaggtgaatatgccgatctatttcgcgataactcacggctaactgtcgacgttgctcgaccaattgtttgggcaattgaagtcagtgaagcctgattattatgcatcaggaatatcgtttcgcgttcgctcatggtaagatgtttgtatgggctcatgattatgtgctcccttcgatggttgtcttcgcaaacaccattttacagggattcatatcatgagtctcttttgttgcacttaaagtataaattcaaggcaataaaaaacgttcaccgcaagtgaacgtttttttgacttacctatttagtttgtgaaacggtgttgcgggcgctaacacgtttgaagacgtggacggcaacccctaaaacggcaccgactaaggcagggactaaccaagctaagccgtagttggcgaatggcaagtatgcctgttcgaagccagtcatcgctttaccgaagctactttggctgacgaccgctggaaaagcagttaccatgtcgaaaaaagcaggaacaacggtaaagagaacaacgaatttatacacgactgggtctttgtggaacagtggtgaagcgactgacaataaaatcaagaccattgatagtgggtataagaacatcaacattggcgttgaccaagcgatgatttgatttaaaccgatattagcggtcaagaatgatgccagagtagttagaactaaccaagtgcggtagctaactttgggaaaatgtttatgaaagtcttgggcaaaagccgcaactaaaccgatcgccgtggttaagcaagtgacggtgatcaaagtggctaagatggcctgaccagcgacgcccatataatgattgacaatttggtcaaaagcgatgccgccattagcggaaactttgaatttacctaaggacatcgcgccaacgaagatcaaaccaacgtagatgacggcgatcattgccattgcgaagacgccggcacgggcagtgaccaacgcgacactgttagcgcgttttttgcctaaggtgcgaacggcggtaactacggtgaccccgaaggctaagccagctaaggcgtccatcgtgttataaccttgcaagaaacccttgacgaaagagcctgatgtataagcagcggtggcgtgttgaacaccggcgtggcccattggtgaactaaaagctaagaagaaaacgccagctaataagactaagaaaactggatttaataacttaccgatattgttgacgattttattttcctctaatgagaaaaagagggctaagccgaagaaaacagcggagaaaactaataaaccaactgtttggaaattctttggtactagtggcgctaagccaaccgtgtaggaaacggtggctgtccgtggtgtaccaaaaagtgggccgatggtgccgtggatcaagatcatgaataagagcgcgaatacgggacctaaaggccgcccaacatcatagacaccttcggaacgagtgatactgattgctaaaacggataataatggcaataacacaccagtgactaagaagccaagcgcggcaggcacccaattctgtcccgctagctggcctaaatgtaatggaaaaatcaagttaccagcaccaaagaatagaccaaaaagcattgaactaaccacgaaataatcgcgtttagtgagtttacgttcctctaacataagcagcactccttaaattttgtaggttgtggaaatgtggttcaaagactaagcgtctgttgccccacgtttaaatcatgagtgttgccattgctaagtcgactttagtaatggcggcgatcatcctgcgcgggaatgatcacgataaacaaaaaacgcccaaacctgaaaaattactttcagataaggacgttaataaacgtgttaccaccttgatttgccattttctcacgaaaacagcctcttcgggtacaagcaccaattggtacgaaataccctagctcgataatgggagcccccaatgaacgctcaaagatgattttctaattgtcgcaccttgacgtccttgcaccaaacgacgctcgcttaactggtgaatacaattatacttttcttatcacagcgtttaattttctcattgatttataatgtttctataatttaacgcgattttaagtgtttgtcaagggggtgataaaaataaatttataatttaaggcagtagtccatattgaattaacgtgtcaatgctatctaatacgatggtcgtattatcaaaatgtggctgccattttaggatatcttgcgctttttgggtactcaactgacgattgacgtgcactaataaattgccttcgcgggcggtctggttgaacaaagcagcgctgcttaaaagcaagttcggcatcgttttagtgggaatgttttgggcaatttgcggtcgtttttggcgaatcagtgctgctatctctggtagtgatatctgaccagcagcactatccagaaaacgttgcccgccagcgtgaggtgcggtcagcgcacgaatgtgtaagtcagcaacatcgcgcacatcgatcagattgagtgggatattgggaatcattttgggacgaccgttaagtaaatttttcaatagatcgaagctgccagaaacgtgggcgtctaatgctgggcccatgatcgccaccggattgatcgtagtcagttctaaactgccgtgactttgttcaataaactgccaggcagcctgttcggcgatcagtttgaatttttcataggccgataagcctttttcgttaggatcagtccaatcggcttcagtggtgatgctcgtttggtcgtgattactgaagccgatggcgccaaagttggcggtcatgacaacacgcttgacggcctgttgggcggcctttaaaatgcgtaaaataccctcggtggcagttgtgtcgctgttcgggtcattggaaaaaacgggtgatgctacacttagcacgtagtcgatgttctgcatggctgtcgcccagccagcatcttgagtgagatcagcggcgacaaaacttaaattttcgcggtgttgcgcctgattttcttttagggcggtgcggacggtggtttgtttgtcgagttggcgtaaggtggcacggacgtgataaccttgatttaaaagttgtaagataatgtgcagacccagataaccgttgccgccggtaactaatacgttttttgtcatgatgttatgctcctattccctaatgagggttaatttaatcagtcatgtatgctatgccgttaagtagcatgatccttgtttatggcttctttttgtttataatagtccctagagtatactctagggcaagcaaaagaacactatttcaacgtagcgatttttaccgtagttgaatgatccgccgcgatgtacccaagggtctatccatggatattttgggtcctcatgatatccaagcagttgagtcaaagctaaacaatttaccgcgccggcaaactggctatcaaacacccaaagagcttttctccgctgcttccgccggttaagttaagtccataaaatatgaatattaatgaaaatactgatttaataggatttatcgtgtggctaatctgttcttgcaatttgggagtaaaattaatcattggtgctaaccactcctttacttagaacctaggttttatcaggttattaaccaaccccctatatattagggggccaagcgttcatatagcacgctcaacgcacatctcttttttttacataaaattccctaaatcggaaattcttatccaagttgataggcccgcgaaatgctacgttcggatatattaaacgtccaatttatttctttttcgttcttaatctgataaccagcgattaacatcgcgcctttcattgcaccatttaatacataaaagccaagtggtgtacgttcaaaaatatgtttaatctcgtatgatgaccgctgactgctaaaagttttaattggtttcaaggttgttagcacccaattaacgagtaccacttgttcatccgctgataattcattgaataatttaggcgcgttagtttcttcaaatttatctccaaccactcttagtaggtggcctcattccaatgattttcaaataaaaaacgtcatccaatagatgacgtttttatgtttatgcgtatagagccttttgattatatttaacatattgtttaccaaagctaacaaccattcctgatatcttcttagcgactggataaagcacaagcccaataatgaataatgccagacatgaaatcaattggaataccataaagcacactaagtgtttttaaaacatgaacgtttggtaatgttttatcttgctcccatctagaaaccgtttgacgtgtaacaaacaaattctgtgcaacttgttcctgcgtcaccccaacattcatcctagcttcctttaaagcattcccaactgacattttgccacctccgctataaacctaatttaacgaattaacccccacaaaaacaagcaacaaatctgttgcatccctgctattaaagcatttcaactcactggcagtcttttatttcccgggttaattcccgaaaacagctaacattttctttgttgccttttgggtcttcacgagttcaccttgaatacaccatctgcggaccgttttatcacaggtaatcagtgtcaccattttacgacctggtacatcatcgatgacttttacgtcgtatggactgattgaagctttgtaatcaactttgtacgtgtagactttttccatatccgttaagtagaccttatcgctgacgcgcacattttcaagtggcagaaagatgttttggaaagaatgccctgctaaagcataattgttaactgcacccatttgctgatcaggtctcattgtgcctccaccttgagccattgtgtcctctgagacgcctttcatgactggcaaggccatcttgacacttggaattgcaacttttcctaagacaatcacatcgcctttaatagcggcattcacaatctgttttgtatcgagtgaatcaaccttatcaaaatcaaagctcgcttttttatgttggtttttcttaatttgagcagctgtgacgtccatctgacgatgcgccatcattttaaccagttggttgcggattagattgatgaagaccaacactaatccaaccactaacagaatggctaataagccattaattaatcggtttcttgtctttttttgcataacagtttaagcccttcactagtatttacgactattgtaacacactattttatatttaccggctctaaatccttgtgattcgcaattaataacagcaacacataaaaacgcacaaccgaaactttcggctgtgcgtttgttgtttattttacgtttaagatgtacataaagaccacgaaaacaaagaataaaacatacataattggatgaatttctttgcgacgaccagctgtaatcattgtgattggatagacgataaagcccaatgcaatcccgtcagaaatactgtaagtcagtggcatgcctagaacgattaagaaggcaggaattgcaatttctaatttttcccagtcaattttcttcaatgattgagccattaaaacaccgacaatcactaatgcgggggccgtcacttgtgacgtgacaaccgtcaataatggtgagaagaataaactgaagacgaataacacacccgtcacaacggccgttaaaccagttcgaccaccaacagcaatcccagcggacgattcgacaaaggccccaactggtgatgttccgagtaatgacccagctaacatggccgttgaatctgataccaaagctttcccaacgcggggcatcttgttatctttcatgaagccggcttgttcagctaaaccgaccaatgtcccggcggtatcaaagaaggtcactaataagaaagtgagtacaacgacccacatttgaacggtgttgatatcgccaatgtgatttaaaccagctaagaaagtgggtttcaaacttggcgcagctgcaacaaagtgtgttggcaacttaattaggccactgatggctcccacaattgaggttagaagcatcccgataaagattgctcctggtactttacggaccattaaaataacggtaatgattaagccgaaaacagttaaccaagtcgtcccttgcgagaagtcccccaaaccaacaacggttgatttgttcgcaacaatcaagccaccaccgtgtaaaccgatgaaagccacaaacatcccgatcccagctgaaatcgctagtttcatattccgcggaatggcatcaataatgatttcccgtagcttaaagacagtaatcaacatgaagattaatgaagccacaaatacacccgctaaggccgtctgccatgacacacccatcccgataaccactgaataactgaaaaaggcattaatccctaaagctggtgcggttgcaattgggtatttagcatataaccccatcaagaaacacccgatcgcacttgctaatgctgtggctgcaaaaacagcccctttatccatccctgaatcacctaaaacgctcgggttaacgaataaaatataaaccattgaaataaatgtggtgaatcctgctaggatttcccgttgcactgttgaatgttgttcttcaatcccgaagaagcgacttactctttccataacgactcctctaaaccaactaattttcccactatctttttagtggtaatgtgtgtataatactgactggtgccaaacccatgagaatgaaagtttgttggcgtgtttaacgacacgtttagaaaacgaactttgcattctctttttttgtactctttttcagcaatacctaccagatagcagataagacatttgtttgttcacgatctggaccaacagcaaatgttgctaatggtaaatcaactaattcttgaattcgttcaacatagtgccgcgcattagctggcaagtcttctagcgtcttagcacccgtgatatcttcatcccaaccaggtaattcttcataaatcggtgtgcaacgttctaattcgcggagacttgctggataacgatcgatttgttcgccatctaattcgtaagcgacacagatcttcaatgttttaatcccagttaggacatccacacagtttaatgataattgggtcacacccgccactcgttttgaatgccgaagcacaactgagtcgaaccagccaacgcgtcttgggcgaccagtaacagtaccatattcatgaccggcttcacgaatgaagtcgccagtttcatcatctaactgagttgggaatgggccatcaccaacgcgtgaggtataagccttagccaccccaaccacttcgtcaatccgtgaagcaccaactcctgaacctgttgaaacgccgccggcagggtttgatgatgtcacaaatggatacgtaccttggtcgatatccaagaggatgccttgtgcgccttcaaataagacattccccttttgatccaaaacatcattcaaaacaactgaagtatcacaaacatattgtttaatttcttgaccatattgataatattctgcaaacattgtctcatattcaagtggttcagcaccgtagattttagtaaagagcgcatttttttcgtctaagttttgttttaatttagttgcaaagagttccttgtccaataaatcggcaatccgaatcccactccgagcggctttatccatataagctgggccaatcccacgattagtcgtcccaatcttttgatcacccttggctgcttcttgtaagccatccaatttagaatggtatggcaagataacgtgtgcccgatctgatactcttaattgactcacgttgatcccttgatccgttaaatatttcaattcagaaacgagggtcttcggatttacaacgaccccgttgccaatcacgctgagtttgtcactgttaaaaatcccagatggaattaattgtaaatggtaagttgtgtcacccaactgaatggtatgacctgcattgtcgccaccttgataacgcgcgatagcatcagcattttgacctaaaaagtcggtaatcttgcctttaccttcatcgccccactgtgttccaacaactactacagatgtcatataaacatactcctctattcgaatccgtcttcagatccgctatttaaaccctaaaactcacaaaaactattgtagcaacaaattatctcaaaatcaatataaaagacgaactttaaaatctctaatcagcctttattcagtaaaatcttaacgatacatataaccgataaaatacgaacgtaaataacgaacaatgatccctgttttgacaggcgttcattaaaaaaatacaatataaccacatctaacaccaaaggagctcatcatggtttacgtcagcaatatcattactgcggcaattgcctttccattcatcgcaatcatcttaaccgttccactgttagtttaccactatcatcgttatggttcgctaaccatcctgcgtagtgtaattctctacagcttcatgttctacttggtagccgcttactgcttaattattcttcccctccccccacgctcggtggtcgctcatttaaccacccctcgctataacttagttccctttacgtttgtccgggagtttatcaactcaacccatttcgtttggaccgaaccgagttcatacctcgcaacacttaaacaagcggcaaccattcagccgttgtttaacatctttttaaccgttccatttggcatttatttacgttacttctttaaaacgtctttcaaacagaccttattacttagttttacgttatccctattctttgaactcacgcaactttccggactgtatggtatttatcctcgcccttatcggttatttgatgttgatgacttattgatcaacatctctggcggactgcttggattttatctccagcccttggtcacctttttcttacccactcgtgaaagtttggatcaagcagcctatgcgcgcggtcaaaaagtgggctacttccggcgcttattggcacttgccgttgattactgtgtgttaggcatcattacatttgcaattgctgttatctggcgattactaaaactacccaccattcattcagaaatgcttcagtactgcctggcaactggtgcttacttcttaatgctccccgttttttggcgtggcaaaacacctggtcaatctctcctgcaactacagattgtcgctgaccatcatcctcgttgggcgatcttctggcgccagctactcctatttttcatcgtcattcccagttttcaactctggcgcgtcaccctggatgccgctgttgctagtggccaacaacattttgacgtctatctctttattatcggtctctcactcttaccaccactgttattcaccggtaacttcttattaagttgggtgactaaacgaccacaattattctacgagaaactaacccatacacgggtcattagtagcattcaccccactcagcaaccttaaaaaagccttaaaatcatctttaattcctaaaaatagttaaagtcggatactttacggcttgaattggctatactaaaggtatcattcgctttgagaaaggattattgcttatgtttaataaattgaagttcctcatccccattgcatttactgctattatcggtctgagcgcacaaccggcctttgccgacagcaccacatcgtgggacaaacccgttgccactcttgggaccagcctttctagcacccaaaaagctgatacccttaagacactggaaaatgccgcgaacgtcacagatgtcagtgaactaacagtgaccggttccacacttgtaaaatatcttgatcaaaatcaacaaacatttaacgccaactcaagtgtctactcaagtgctttaattcaaaaaaatgacagcaataccggcatcaatgttaaaattatcgattttaatggccataacaacatcaccacaattacagccaaccaatataaaaatgcggccttaaccgccggcgtcacgaatgcgacaatttacgtgacttccgccattccaatcgatggctctggcgccttagctggcgtttacgccgctttcgctgaaaatggcgattcactcaaccaagcgcaagtaactgctgctcaagacgaaatgagcaccctcagcgatatcacacaggctaataaaggcaccgatggttattcagattcccaattgaataatgccgtcacaggtgccaaaaaagacatggcaagtaagggcaataatctgactgttaaccaaattactaccatcgtcaataatcaactcgaacaaaacaacctcaccaacatcatcaacaataatcaaaaacaacaaatcattaatgttctcgttaaaatccaagattccggtgctttaaattcggatgatttcaagaatcaagccggtaagttaatgaataatatccaaagtggtgcgaaaaacatcttcaataagctcaacacccaaagcaatcggaacttcattcaaaaactctttgatagcatggctaatttcttcaaaggattatttaactaaataacacaaaaaagccccgcaaacttcagtttgcggggctttttatttattcattatttcgttgttgcttttaaggcaactgcgtctgcagcaactgtggtactcattgcgttaaacttaatgtaatcaacagcgggcatgttggtaatgatcaccatcattgccgtcttcttaccagcagcagtaatttgattcaaatcaaccgttgctaataagtcgccatgtttgattgtttggccttcttcaacagcgactgcaaaaggtgcgccgtttaattcaaccgtatcaattcccatgtgcactaagacttctaaaccgttcgttgttttaatcccgattgcatgtttcgttgggaacacagtcataacagtcccatcaactggtgcaacaattttgccgtctgttggaatgacagcgtagccatcaccgagcattttttgagcaaaagttggatcatcaacattttcaatatcgatcaattcaccattagcaactgcatagaaaacatctgtttcacctgagttaatatcgctatcaacaggtgcttcaactggtgcggcagcttgttctggtgtacttgttgcgattggcgtattgtggttataaagttcttttaaagcatcagcaacaaattggacttctgtcccaataataatttgaatgtttgttttatctaaaacgttaatcccagcagtaccagcagctttaatcgctgattggttaacattggcagtgtcttctaattgtaatcgaagacgtgttgtacagttgtcaatcactttgatattgtctttgccaccgattgcagcgtagatccgttttgcttgaaccatgaatttatcatcagtagcgtctgtttcaacgccagcagtatcttcatcaacagcatcttctgcttcacgacctggtgtcatcaagttaaacttcttgatggcaaagttgaacccaaagtagtaaataactgccatgaccaacccttcaaccaataacatcaacggttggttagcaactgggtttttcaaacttaaaacataatcgactaatccagcactaaatgcgaaaccggctgtccagtggaagaaagcagcaacagccaatgaaatccctgtgaaagctgcatgcaatacataaagtggccatgcaacaaacatgaatgagaattcaagtggttctgtcacccctgtaaagaatgacgcaaaaccagcagctaacatcaatgaagctgttgctttacggcgttctggacgagcatttttgtagattgcgtaagccccagcaggtaagccgaacatcatgactgggaagaaaccagcttgatacatccctgtcttaccaatcacagctgaaccattcgcaagtgatttcgcaccacccaagaaattcccgatatcattaatgttagcaacatcaaaccagaacacagagttcaaggcatggtgtaatccggttggaattaataaacggttgaaaaagccgtatagaccggcaccaaaccaacccaatttagaaattgcttcaccaaatgacactaatactgtaaagacggctggccaaacaaagtacaagatagctgaaacaaccatcattgcagttgccgccataattggcactaaacgtttcccactaaagaatgagagggccattggcaacttcacgttgtggaagcgattatacattgcagccgcaattaagccggcaataatcccgattaaaacattcccttcaatcttaccaaaagctgggtttactttagcgatgtctgataaaccttgcatcgcttgaattgaagcaggtgccaagattgtcttaggcactaagaaagcgactaaaccagcaagtgcagctgcaccatcttgatccttagacatcccgagtgctaaaccaacggcgaataataatggcaagttatttaaaattgcaccgccaccggctgataagaaaattgtaaagacgtttgcgtttgaatcgccattgccaacccagttcgcaatccccattaaaattgcggctgctggtaaaacagcaactggcaacattaatgaacgacccattcgttgtaagtaattcttcataagtttttctccattcatttttttcgttaatatgattaaatcattaatgtaaacgataagcaagcgcttaacaatcggtatagacctttataaatagcggttgaagcggtttcatgcacacaaaaatattggtctatacctaaaagttaacaaatgatatctgattcaccaaataaaacggttgcattcacctaccacactctctataccgagggtacaaattaatcgctttgcactaggggtgttcttagaagaactgagataggtttgtacagcctgatccctttgaacctgtaagttcagacttgcgtaggaaagtgcctttctttagactactcacaccacttttctatgcattcgtgcatcgttaagtgatttttttagtttttaagggaggtttttatatggttgtttcactgttagaaaaagttagagcgctcaatccaatcgttgctaatgtcgcaaatggcgtcacaattgatcaggtcgccaacgcacaaaatgcaatcggtgcctcaccaattatgtctaatgcaccagaagaagcggagggaattgttaccatcgcacaagccattacgattaatattggtagtttgtgggcaccacagattcaagaaatgatggccctaatgaccgccgcttatcaacaacaaaaacccgttgttcttgatccagtggcagttggctcactggcctaccgccagcaaattatcgagcaactattaatacttgacacaccaactctcattcgtggtaatgcaggtgaaattgcttattttgctgggatagattggcaagcaaatggcatcgacgccgggcatggaaatagcgatccagtcattattgctaaggccgcggccaatcgtttacacaccataattttattaacgggtccgaccgacattattacagacggtcaacgcgttacgctgatttcaaatggtacctcactttttcaaacacatgttggttcaggtgatatgttatcgggtctctgtggtgcatttgttgcagttcatcctgcagatccctaccaagccgctatcgaagcagccgccacatttgccgttgccggcgaactagtagccacagcaatggaaacaccgctacctgggaccttctatccccaattaatcgattatttattccacattaccccagccaaagtagcaaataccgtccaactaagtgaggtgcctactcatgaatgaattcccacaagctctaaccatcgccggttctgacagcggtggtgtgctggtatgcaagctgatattaaaactatccaagagcgccatgtttttgcaaccaatgtagttgtcgcgatcaccgctcagaatacgcttggcgttcaagccagtctgccactatcactaatcaatcaacaattcgcttcattggctactgactttaaaattcgtgcctgcaaaacgggaatgttggcagatgctgaacatgttgcaacggtcgctgaaaatctacgccattatgattgggggccgctcacccttgatcctgtaatgattgccaagggcggtgcacagctacttgccgacgatgccatcgataccctacgtactgaattattgccgctagccacagtgctgacacccaacttacccgaaaccgaagttctcacgggcagccgcataaagacaacagctgatttcaaacaagcggcccaccaactccaacaaatgggcgccaagaatatcattatcaaaggggccatttagactatcaatcacaagccgccgattacgtcctctaggctgatggacaagatgaatggttaactacaccacgaattgctactaaacgaacacatggcactggagatacgttttcagcttgtttaaccgccgagctagctaagggcacccctttgaaagcagcaattcatattagcaaagcctttatccaagccgcaattgctaatccgattgctgttggtcacggccacggaccaaccaatcactgggcttatcaggaggttcatcatgactaacatttcccgggaaatgttccaaacttatttggtagcgggtacccaaaataccggtatggatgattttctaaacattctcgaacaagcactacaagccggcattacctgtttccaattccgtgaaaaaggtgctggtagtctgcaagattccgatgcgattttaaagtatgcgacagcggctcaagccctttgccgccattatcaagtcccatttattatcgataacaatctcgatttagcacttcaaatcaatgcagatggtattcatgtcggccaaagcgatcacccgtggcataaaattgaaacggccaaagcacacggcttaataactggtctatcttgccacactgaacaagaacttcaccaaagtcataatcaaccgatacttgattacattggcattggtccaatttttccaaccaattccaaagaagatgctaaaccagcacttggcactaatcgcttgcgtttcttaacgcagcaaagtgaactaccggttgttgcgattggtggtatcaaccaagaaaacgttgctcaagtcgcaaagactaccgtggatggagttgccgttatctcagcaatcacccacgccacagatatcgctcaagccgtccaagcattacaaaagccatggcaccgcagtactaatgaaaaccaatcgtaattaacccttattacggtttgacccattctgaatagtatttgctgccagtttgatccaccaaacatttaaaaaagccgctagaaccctttttatagagtactagcggctttttctcggtagtttgctgatatttagcttagtgctttgttagtgatgactactccatttaacactactcggtaaacttattcattagcaagggcttcaaaataacttgctttttgctgcgcccagtaggcctcttctgcctcatcaatcggccggagtacccgacatggattaccaactgcaatcacgttatcaggaatgtctttagtcacaactgatccagaaccaatcaccacattgttcccaattgtcacgcctggattaacaaccgtattgccaccaatccacacatcatccccgatggtgattggcttaccatattccagatcatcccgacgttcttgtgccgtcgttgggtgaccagctgtgtagagtcctacacgaggtccaaagaaaacgtggttcccaatcgtcactggtgctacatcaataatgatgcaatcgtaattcatatacacatgctcaccaatgcgtgtttggcaaccataatcagttctaaatggtggctcaatatataaatctgagccacttttcgcaaataaagacttggttaattcgcgtcggtaatcttgttgttcttcagtggtttgattaaacaaccgagtaagtacgcgcgcgtgtttcatatcggctcgcaattctgaatcgttcgcccgataaatttgaccattaatcatgcgttttttttctgacatttctttatcccccatcactactaaaataggtgcgtcacaattgtggcgcacctttttaatttaccaaattgcaacccgtttagcgggtgctaagtacatctgatcagctttcgttacattaaatgtctcgtaaaaggctgccaagttttggacctgaatattggcccgcaacgcgtttggtgcatgaacatcaatatttaacaataattgttgatattgctttgtagctttcatccgccaaatcgttgcccaattgacaaagaaggctgccaaatcaacatcaggttcttctttggctgcttcaagggcacaactcaagccacccgcatcggcaatgttttccgagacagttaatttcccgttaactgttgcgcctgcatattctaggccatcaaattctgcaatcatttcttccgaaagtgtcttgaagtgagctaaatctgattcttgccaccaattatgcatgttgccatactcgtcgaattgcgcaccgttattatcaaaagcatgtgagatttcatgtgcaatcactgcaccaatcccaccgtagttagcactgctactttgttctaaactgtaaaaaggtgcttgcaaaatagccgcgggaaagacaatgatattcttcgaaggtgaataataggcattaactgtggcagcgcccatttcccacttattacgatccaccggttgagtaagtttcgcaaaattttccgtttcaatcgttcgaataaagtcagctgtattttcaaataatgtcccatcttctgctttaggtactgtgaccaacttcgcaaaaataggggcaatctgatccgggtaaccgacatgaatcccaaggtggttgagttttacaatcgcttgttggcgtgttttttcggttagccagtcatttttttcaaggcgtttttgataaacaccaatcattttttggaccatcttttggacgtcggccttggctgcttcaccgaagtattgccgaccgtaataatcgccaacaacttgattgaacatccctaaggcaaggtagtaagcactcttttgttgtggacgagcttccttgctaccagataacgcacgactatagagcgaactaatttggcgtgcctcttcattcagataaccgctccaactacgaactgtcatgactaacagccacgctttgaacgtttcgaaattggcgtctgtcacaagctgactcagttgcgcaaaatacttcggttccgtcacgataattttttccggttgaacaggtagcaccttgctaaataaacgtggaaaatcaagcgtcgtttgttgttgcataaaatcactcaaaggctgtggattatagagtttcgtgtaatccgctgcttcttcggcactcttcacataaggtgccagtgaccgatcaaatgccaacgctaatttaaccgtcttcgttgcatcaacgggcgcaatcccaattttctgcaagagctgaaccatcatatccgtaaagacggccaataaatggtcagcattgggattgtcagcttcataataggtcttatctggcaaaattaagtcgctagcttccgcatacaacgcgtgatgggctgtgtctttcatgtcagcatcgacagataagccaaatggtgttggtaacccggaaagtacccaatcagctaacccacgattgtaagttgctaaactatcgagagattgcacccgggctaccattggtaggatcggtttcataccgagtgcatcccgcgtttgaaagtccgcagctagttcgtaataatctagaaaatgttgtaacaatgcgttctttacggtcgacatcttagcaaaatcagccattaattgctgatcaatctcatcaaccaaggcgacaaagccgcctgttgctggtttatccgctggaatttcagccgtttttaaccattcttgattcactgccgtataaaaatcatcttgcattcgcacgtttgtcatcattgtcctcctcaaaagcagattctttcccaattttaacattttgccactttttccgttaatgctttgaccccataattgcaaaaaagccgcaatttagcggctatttcgttggtaattgtttttcaacttgataatttgaatcttggttaagtttaaacgtcttcttcaaaccgtttgatagatagattttattatcttttgtgatcatgatggcttggatattcttcggtttgttgttgatgagctgcatgccttcgacaatccccttattaaagacagcatttgaaagggcatctccatctactgatttaggcgagataattgtgacactcgctaggttattttcatatgggtaaccagtatggcgatcaaagagataaatgtaagtatgcccatctttttttagataatgttcataaatccccgccgtaacaaccgaaatatcacggcctttaatcgtaccgactgattctccacgcgcctttttcggatcttgaatgccgaccgtccatggtttgttcttccctaatggtgaatgccccataacaatcacattcccacctaaatcaataacggctgatgtcacaccattttccttaaaaacttgtttaacttgatcggcaatgtaccccttagcaatcccgccaaaatcaagtcgcatgccttttttcttaaggtaaactgtacgtttggccttattcaaaacaacgtcatgataatcgactaatggtaacgcttggtcaatttctgcttgtgctggcacccgcgcgcctggtaacccaatttgccataaatctgtgatcgcaccaatggccatatcaaacgcgccatccgattcttgactataatgtaacgctttttccattagtggccacatatctttgctaacctgtacaggtttaacaccggcgttatcattaatcttatccaattcggaacctgatttggttaacgttgcttgattttcggactttttaatccgcgcaaaagccttatctagcacggcttccttgtctttattatagattcgcaatgtacaaatcgttccgagatagtaatcacttttttcatagggctttttgaccaacgtttctttgtccgctggcttactttgacagcctgccaataccagtgtcacccctaagagtgccaatccgaattttacccatcgtttttgcatcgttcaatcgctctccttgctactaaaatcacatggctctatcataccatcaatccgctttaattagttgtaaaaatcttctactggcgcgattctttgagttgctgataggtggcaattaatgctttaaaaacacctttatccgaataaactagaatattcatgcgatagataattaatgctaaataagtcagtccaattagtgtcgccatggctatgaagagtcccatgctagccccgaacgcgccaacatcaccgtttgccagccgcacaggtaacataatctgtgaaaacaatggcacatagctcaccgcccgcaataatggaatatcggtctgtgatgccagtacaaagccacccaaataacttaatgtgcccagtaaaatcaatggcgaaatggcttgttgtacctgatccattcgagacacaacagcgcctaacattgcagctaatacggtgtagagtaataccccaataattaaaaagactcctgcataccacattgctggcgcaaccaaagcacgacgaataatcggcaataactctgctaacggtagttgctgtttcaaaaactgaaacccgacaatcccaactaaaatatagacagtaatttgggtgagtaatagggctaatatcgcggcaatcttcgcgaaaaattgaatttcaatcgaaacacttgatagaatgatttccatgattcgcgaccctttttcagtcgcaatttcttgggcaatcattccagcataattcacgataaagatgaacattaagaccgtaattccaattgaaataatttggcccacttctttagtgttttcctgggaaatcttttcatgaccattctggtaattaaccgtcactggtgcaatgacagttggcgtcatcaatttctggatctgttcaggtgcaacgcctgcttgttgcgccaaagctactaaatgaatctgatttaactgattctctaagacactcgcatcaaatgatggactatcttttcgttcatagtagcgactgattgtctgtcctttttcctcactcaacaacaaatagccatcaattcgctctttctggagcgctttggtggcttgttcccgagtcgtaatctgctgatcgatttgatatgttttaccttttaactgctgtaattcactctgttctgctggttgcggcgccaaaacagcaattctaacgggttctttgctatgatccatcaagcgactcacaccaaacgtaatcccgagcatcacaattggcatcaaaatcatgattagatacgctgggcttttaatattctttagaaatacttgtttaaaaatcaccttaaacttaaacatggccttcctccactttcattctaaagatttcatcgagcgttggtgcttgttgactaaactctaggatatagccattttgtgtcgctaagtcgaaaatcgttttaccaaccgtttcgtctgccaaagttaattcaaaccgctgcccatgctgtgttacacgtgaaacaccgttgatatttgctaaagtttcgcgtgctaaaggtgcttctaagaataattgcgttcggccaaactgattccgaatttcatcgattgtaccggcgagcaccacttgcccatcgcgcaacatcacaattcggtcactaatccgcgcaacattcgtcatatcatgactcgaaaaaatgattgctgaaccttgttctttaagccataaaataccttcttctaaaagttctgcattcactggatcgagtccactaaagggttcatcaagaataatgagttccggttgatggatcaaagtcgcaatcaactgcactttttgttgatttccctttgaaagatccttgattttatcagtccgcttacctttcaccccaaagcgcaccaaccactcatcaatctgtggtttgatgtctgcgatgctgcgcccacgaagctgtgcaaagtacaaaatttgttgttccacggtcatctttggatacaatcctcgttcttctggcaaatagccaagttggtcataatccgcagcggtaaacgcgcgacctttccagagaatagttcccgtatctggtgccatgaaattcaagatcatccgaaaggtcgttgtctttccagctccattttgaccaattaagcctaatatttcgcccgacttaaccgtaaatgaaacatcgtcgaccgctagcatcgttccgaaacttttggataaatgtgataaagtcagcacgtccccaaccccctacttttcattaccttaactataccgtattcatttggtagattatcataaaaaagaaaaaccaatgacaaaaattctctgcaacaaaaaaagccctcatccaccgccaaacaattcttggcaggtgcatgagggctttttaattacatcatatcaaacaacgacaattgattttcatcaggcaagtcattcaatacgttattttctgttaggtattcgatcagtgtcttggaaactttcccacggttggataagtcttctttagataagaatggcttttcttcgcgggcggaaacgatttgtttggcgacgttgccgcccaaacttgggacggcgcggaatggtgcgagtaaagtatggtcgtcttggatcaagaaatcagatgaatctgatttttcgatgtcgaccatcttgatgttaatgccgcgttccaaacattcgttggcgatttcgaggaccgtcaacaagttcttttccttggtgctggcttccatccctttatcggtgatttccttcatgcgggccttgacgccttctttaccttgggccatggccacgaggtcgaaatcttcggcacgcacactgaagtaagcacagtaatagataattgggaagtagactttgaagtaggcaatccgcaatgccattagaatataggcggtcgcatgggccttggggaacatgtacttaatttttaggcaggaatcgatgtaccagtctggcacattttcgttgtcgcgcatggcttgttgccagtcatccggaatccctttacccttacgaacccgttccatgatgttaaacgacatgctatcatccataccccagtgaattaaatccatcatgatgttatcacgacaaccgataacgtcttttagggtgacaacgcctttgttaatcagttcttcggcattacccaaccaaacgtcggtcccatgcgaaaggccagaaatttgcaataattctgagaacgtcgtggggtgcgtttcttcgagcattccgcggacaaaccgcgtcccgaattctggtacaccgagcgtgcccattttcgaattaatctgttctggcgttaccccgagtgaatcagtgccggagaacaaggccatcacaccaggatcatcggttggaatcgtcttgggatcaatccccgataaatcttgcagcatccgaatcatcgtgggatcatcatgccccaggatatcgagttttaagatattatcatggatcgaatggaaatcaaaatgggttgtcttccaggctgcatcttgatcgtcagctgggaattggattggtgtgaaatcatagatgtccatgtaatccggcactacaatgatgccggccggatgttgacccgtcgttcgtttaacgcctgttgagcctttggccaggcgatcgacttctgcgccgcggaaagtttgttcggtatcacgttcgtaggctttgacatagccgtaggcagttttatcagcaaccgtcccgatcgtcccagcgcggaacacgttattttccccgaacaagactttggtgtagttatgcgcaaccggttggtaatcaccggagaagttcaaatcgatatcgggcactttatccccgtggaagccaaggaaggtttcaaatggaatatcatggccatctttatcaaggggtgtcccacattcaggacagtctttgtcggctaaatcgtaacccgaaccgacttcccctttggtataaaattcggagtaatgacagttgggacagcgataatgtggcggcaatggattaacttcggtaatcccggtcatcgttgcgactaaactcgacccaacggacccccgggaaccaaccaagtacccatccttaccactcttatacacgagcttttgcgaaatcaggtagataacggagaaaccgttcccgatgatactcttcaattccttatcaaggcgcgcttgcacgatttcagggagttcatccccgtataattcatgcgcacgattcatcgttaaggtttgaatttcatcttcggcacccgccatcttcggcgtgtacaacttatctttgaccggtgtgatttcatcaatcatatcggcgatttggttcggattcgtcaccacgagttcttgggcaatatcggcaccaagaaaatcgaacgccgtcaacatttcatcggttgatctgaaatgaacatccggtaattgtgaccggttcagtggattggcaccacccatcgagtgaatcaaaatcttccgatagattgaatcttctggattcaaataatgtgtatccccagttgcaaccactggtttatccaattcagcaccgagtttgaccatgttgcgaatgatttcttcaagcgcccgattatcgcgaactaattcacgttctaataatggtgcgtaaacggcttttggcattacttcgaggtaatcgtaatacttcgcgcgatcgcgtgcttcttggtagcctttttgcatcatcgcttcgaagacttcaccgctggcacaagctgaaccgactagaatgccttcacgtaaggcatccaagcgactctttggtaaacacggcgtgcggtaatagtattcggtcatcgatgctgaaatcagtttaaataagttcttcaacccagcttgggtttgcgccattaaaatcgcatgtgctggccgtgcttgtttatacgcatcgccaatcccaacgcgatcattcagttgattgacgttgaccatcccatacatgtcggccgcttcggcttctaatttgtataacaaataaccggttgattcagcatcggcgttagcacgatgatgatgttccaagttaattttataccgcttggttaacgtatcgagtttatgatttttgtattctggatgaagcatccgagaaacttccaacgtatcgatgacgggattttcaatctgaccgaggtcgttacgaccatagccagcattgataaagcccatatcaaacgttacgttatgcccagctaagacagcatcgcccgcgaattctttaaacaacgctaggacttcggcttctttcttagcaccgtgcaccatttcattggtgatactcgtcaattgcgtggtgaaagctgatagcgggtgaccgggatcaataaattcatcgaacgagccaatcacttcgccatctttcattttgacagcggccaattcgataatcgaatcgtaaacggctgacaatccagtcgtttccacatcgaaaatcacgtattcagcatggtcgagtgcttcatcgcgcaagttatacgcgactggcgtgccatcgttgactaaattgacttcgacaccgtacaaaatcttaacgccgttcttcttccctgctgcataagcatctgggaaagcttgtaagttataatgatcggtcaccgcaatcgcggattggccccatttagcggcttgttgaacgaagtcgccaatcttgttggtcgcatccatttgtgacatattggtgtgcaaatgcagttcgacgcgcttgccattttcagcggtatcttggcgtttgggatgactaacttcgaccaaatcattggcattgaccacgagatcgcgcatgaagttatcttcttgaacactcccgcgcaccttgaaccacatgcctttatcgatggctgcgaagatactttcgtcgccgttatcccgggagaatttcttgaccgtaaatgatgatgagtaatctgtcatcttcaaaatcaagagctggcggccagaacgtaaaacgcggacttctttatcaaagacgaacccttcaatgacaacggaacgttcttcttcattgattgtaatcatctgacgggttggttcagcaggatttaagccgcggcccattgaaatcgggccatcgactggtttgccttctgattgacgtttttctttgagtgcttcatttttcttgatcgcttcggctgccgcttgtgcgcgggctgcatcttgttcagccttcttcgcttgaaaatcttcgattgccttttgtgaggcggattcgtcaatcaagggttgaatcgcaaacttgggaaaaccaagccgttgataaccagcttggattgtcgtttgcgcttgatttaagaagaacgtcttcacgatgtcgttttcgacaactaaaaagacgttgtgaccgtcgatatagggggtctctttttcacacaattcgtgcaacattgaagattgaatcccactatggttgatgacgtattcccaataagctgctaaaacaccgccgtctaattcagttgcatcggtcgaaatgtcgaccgcgatatccgcaatcgctttgaaggctgcttctagatactgttcaaacgttgtgtaaacagcatatggcaaaacggattcgaaatgtaatttaaaagtccaccgtttggatgtttcgtggacaacgacttgttctacttggccagttttgaagccaggataattcgcaacatccgcgggtaaatcaatttgttctaataatttttgaaacagtgcggtttgatctaatgccacaaaagggcctcctcatattcagaaagttaaataaaaggggctaggacaaatatcattctgtctcagccctttttagatgtccgaacatttataatgtaaacgcgctttttgaaactgcctcttgcgctcagcgctgggaatcaaattatcgactgcgtcgttaattcgcttccctgtgctaatgctcaaaagttgaccgagcttgaacgcactctattcagcttctgttgtctctgaagccaataggatacctaatgaattaatcaattcatccttcttcacttctagggtttcacccgtcttacgtaatttaacttcgacgatttcttctgctgcttttttaccaactgtgatgcggattggtaagccgattaagtcactgtcggcaaacttaacgccagcccgttctttacgatcatcaactaagactgagtaacctgcttcttcaagtaagttttcgatctgttcagctaataagacttggtcagcatctttgacattgaccggtacgacatgcaagtcataaggggcaatcgcgcttggccaaactaagccgttttcatcagcttgttgttccgtaatcgctgataagaggcggctcacaccgattccgtaagaacccatgataattggtttcgcacggccattttcatctaagaaagtggcaccgaattgttcagtgtaacgtgtgcctagtttgaagatatgcccaatttcaatcccctttgtaaagtgcaagttcccttgaccatcaggtgatgtttcgccttcttgaacgaaacgtaggtctgaataatcagctacggtaaagtcgcgcttgctgttgacattcgtgaaatggtgatcggcttcattcgccccaaccacggcattcaccatggcttcgacactgtaatcagcaacgatttgtaagtcttctggcgcgttaactggtccgattgaacccattggtgcgttcattgttgctaagacttgttctggggttgccatttctaagaaatcagcatctaagaagttcttcaacttcacatcattaacttcaaaatcgccacgcactaagaccaagaccggttggtcgtcagcgataaagagaacactcttgatgatttgttgtgctgggacgtctaatttagcagccacttcttcaattgtgtgggcatcgccagtcgctactttttcaagctctaattgcacatcacttgagttttgcttaggacggacattcgttgccatttcaaggttggcagcataatcactttggtctgaataaacaatcgtatcttccccaatttcagcaatcgcagaaaattccattgaatccttaccacccatggcaccggcatccccaacgattgcgcggaagtctaacccacagcgttcaaaaatgttggtgtatgcttggtacatttggcggaaagtcgtatccaaatcagtttcattggctgaaaatgaataagcatcttgcatgatgaattcacggccgcgtaataaaccataacgtggacgatcttcgtcacgatacttcgtttggatttgatataacgttaatggtaattttttgtatgacttaatttcattgcgcaccaagtcagcgaaagtttcttcgtgtgttgggcctaagatgaagtcgcggccatgacggtccttgaacttgaataagttatcgccataggtttcgtaacgacctgattcttcccacaattcagcaggtaaaatccctggcatttgcatttgaacggcgtcaatcttgctcatttcatctttgatgatggcttggatgttttccaagacgcggaatgctaaaggtaagtaactgtaaacaccagcagatacttggtgaatatagccggcccgtaacatcatccgatggctcttagcctcggccgagttaggcacttcctttaaagttgggataaataattttgactgtttcataatctgttatgcctccaaaaataatctaaaagaaaaagcgttgaatatcgttccatgtaaccaagaccattaagacgaccatgatgccgaccccgacaagggtgacaatgccttctttttccggtgagatgggtttaccgcgaatcgcttcaatcacgttgatcacgagcttaccaccatcgagggctggaattggaatcaggttcataatccccaagttgacggataagaacgctaagaagtagacgagcattgtaaagccttgactcgcgaattgcgtcgtcattgaatacatgccgactggtccggctagtttattgagtgaaaaaccacccgttaagaatgacccgagaattttaaaaatctgggtcgcattcgcccatgattgggtgaagccatatttcaacttagcccccacgctatggttgagtccagctgtcacaccaatttggccgactttccccttttgcccctcgactttcaccgctttaggtgtgatttcgagtgacttagtttgctttgcccgtttaacctggacattcactggtttattcggatattttgcaatcaccgagctgaaatcagtaaacgtcgtgacttttttgccagcaactttcactaaccggtcatccgttttaagcccggctttttgtgctggcgagtttggcatcactgtgccaacaatcgctttgttttgtgggacgccaccgtttaaaaaagcaaagagcgcaaacgccacaatcgcaaggataaagttgttgaacggtcctgcgaagttggtcaacatccgattgattaaactagccgactggaattgaacatccacgggtgcgatttgcacttccgttccgtctgattcaacaatcgttgcatcgtgactgaccgaataacgttttaattcggattcgtcaccactttcatagccttcaatccataattctttttgcaagtcagtttttgcaatttgaaatgggacaccgtttaacgtggttactttgtcacttgtattaattttttgaacagtttcttgttcgtctaacagcaaggttgcttgcgtgccggcttcgatttcagattcatcatccgccatccctgccatgcggacatagccgccaagtggtaaccaacgaatcgtataagtcgtgccatttttgcgcgttgcaaataattttggccccatgccaattgaaaattcacgcaccaaaataccagaacgtttcgccatgtaaaagtggccaaattcatgcaccactactaaaatgccaaatatgataataaacgcaataatcgccgccaatagagtacgactcccttctaaatgcgtatttcaatactctcatttgatatgaactgttatattatatcacgaattccttagaaacaagaaaagcgtttagcgcaaaccaaaaagttgcgctaaacgctagataatattgacttttaaaaacgtgctttttggttgcaacaacttccgcttaatctaaaatttcaaataatcctgaaaccgggattattcgaatttttgtattaatgctcagttgctaaccgccacaaacgcactctaaatcatgccaaacaagtgtagtagcggtaagacaaacaacatgctgtcaaagcgatctaagatgccgccgtgacctggtaagattttgcctgagtctttaacgccataatagcgtttgtaagctgattcgactaaatcacctaattgaccggcaattgagaagatcaacgttaaacctaacatgacaggtattgaataagcttgtgggaagaagtttaaataaatagctgcgaccactaatgctgataatgtcccgccaattgaaccttcccaagttttattggggctgatagctggccacattttattcttaccaaacatccgtccgaatgtgtaggcaccgatatctgtcatccagatgaccaataagatatacatcacagtgtcaaaaccaccaatatttcgcgttgcggctaaataatggaagcctaagccgatatagagactggctaaggttgtgacacccatatcatcgaagttaacccggtttttcgtgaagactgtgatggctaataaaatggcaacgaagaagtagaataaatcaaattgtgacacacctgctggtaaccagttaaaggcgcctttgggtgaggctaaacttaacaccgctagtccggcgatggttgcatcaggtgagacaataattcgtttacgcatgatgaaaacttctgataaggcaacgagtgctaaaacggctgccgcgatatcaatgtaaataccaccaaagaaaatgatggggataaagatgattaaagcaattgttgctgtaatgacacgttgtttcataattgtatttcctcctatttaagaccgccaaaacgacgattacgtttttggtaagcgccgattgagcgttcaaacactgctggggtaaagtctggccagaattcatctacgaaaacaagttcgctgtaagcaatttgccagagtaagaagttcgaaattcgctcttcgccactcgtccgaatcaataattctgggtcagcatattcccctaaaaagccagtcatcaagtaatcactaatcaacgcatcgtcgattgcatcgacctcaattgtaccatttaccgcatctttagcaatctgcttaaccgcttgttggatttcgtcacgcgacccataattgagtgcaaagttcaaaatcatccctgtgttatcagccgtatcggccatcgcattgttagccgctttttgcgtcttttctggtaattcttgaatattacccatgactttcacacggacgttttcagcaatcaattccggcatgaacgtatcaaaaaaatcgaccggtaactgcatcaagaagttcacttcgtcatttggacgcttccagttttcagttgaaaaagcgtacaacgttaagactttaacacccattcgactggccgttttggtaatcgtcttaacgttttccattcctgctttatgcccagcgattcttggcattaagcgtttcttcgcccatcgaccgttaccatccatgatgatggcaacgtggttggggatattggtgggatctagttgttgtgcgtctgtttttttatttgtaaacaccacatactcctccagtttcaataactctcatatgattgtaccaaaaatcacaggaagtgactatttaaaatcaaccgattgtcaccggcattgtacaaactgaaccgcccattctgcactttttgagttcttcccagatgatttttatccacgattaagcctttaataccaacgattcccgccacaacgtactgttgccgctatcacattgaaatttattgttaaatattagtagattcctatagttattggcatgtaacaggttaaatatgataaactaatacataccttaaacagaaaaagggagtttattatgcgaaaaaccttcgaactctttcgacttgattggcgtcgaatcttaaaaagcccgatcgctcttctattaattattgccctcattatcattccatcgctctacgcgtggtttaatatctgggcgttatgggacccttatagtaaaacgcaagacttaaaagtcgctgtttactcagccgatcaaagtgttgtcattgctgacaaaaaagtcgagattggcgccgaactaattagccaattaaagaaaaacgacaaattaggctggcaatttacttcgagcaaaaaagaattagatgacggcgtaaaaacggggaaatactacgccgggatttacgtgcccaaaaacttctcaaaggatctcgttagtttcgtcgatggcaagattcaaaagccaaagatagtctactcatctaatgataagattaacgcgattgcgcctaaaattaccagtgcgggtgcaactacgcttcagtccaccatttcagaagaattcgtctcaaccgttggtaaaacattgatgagtaccctaaacaaggccgggattgatctcaatacaaatctccccgtcattaatcgtttctcgagcctcattctcaaaacagaccaacaaattccagaaattaaccaatacgcagaacaagtgcttaatctacaaaagaaactaccggaaatggcattaaagcttgcccaagccaacgagttcgcggcctttttaccacaagcaaatgccatggcgcaaaaagtagtcggcatcaatcaatacttaccacaagttgaagcagccggtcagctcgcaacgaaagttcaggctaagattccagaaatccaaagtgctggcaaacaagttgccacactcgattctgatttcgatggcatcgccaatactttaacgaacggcattaacgaagctcaaactggtttagatgtgttaaacaaaacacaaaaagtcttaccggacttaatgacttttagccaaacggcccaaggtgtcgcgggtcaattacaatcagacttaatccctaaactccaagctgctttaccggtcattcaaaaaacggtggatcaagggttagccattaccaatcaattggcaactaacatttcaactaatttaacggccgtcaatagtttgctgagtcaactcaaagaggatcccaataatgctgaactcaagcaagcgctcaaagaagcgctccagaacttatctgatcacaccgctaccttgcaaacccatgcgactcaacttgcgacaaccctccaaaacttgcaagacagctacaatcagtcagcagtggcgaatggtcaaccggaatcacatgcacttgatacaccgattaaacatttaaatacgttggcgacccaactcggcgtttttaaaggccaagttgatgaccttctcgcccattacgatgatttatcaattgacgatttgcaaaccaagattaatggtttgattcaatacgccgaccaagtcgaagacagcgtcgctaagattcaagcggcccatatcggtgacagcgtcaaaaatatgctcgaccgcttttcaacattaattgctagcggtaatgccgtcttaacacagcttaacggcgaagttttaccgaaactccccgcactcttattcaacacacaaaagacgctccaacaagccatcgactatctgcaaaaatatgctcagcagttaccagcgttgaaacaagaaattcatgacgcgaatacattattaaatggcaatatgggcacgattatctctggattaaacaccgcttctgacgtttaccagaatgattacccactactcaaaaataaactgcaactggcaaccagtttcatcaacaatgacttaccaggcatcgaaaacgacttaacaacgacgctcaacatggccaacgagaaattcccactcgttaaaaccgccttaaatgatgcgaccaacctcatcaacaatgattggccattcttacgtagcgggatccaaaaaggcgctgaggcgattcgcaaacaacaaaagacggtcgatctcaaagatctgattaaattgcttcgccgcgatgcaactaaggaaagtaatttcttagccaaaccggttgaactgaaagaaaaacacgtctacccgattaagacctatggctcagcaagtgcgccgttctacacagccctttgtctctgggttggtgcacttcttttgagtaacatcgtcttaaccaacttcgcgttagacgacaaacaaaagaatcagtacactaagaaacagcaatttattgctcgctggctaacctacatcgtcattggtgtcgcccaagccgtgattgtgacgcttggtaatattttcttattgaaggcctacatcgttgataaactaccgctaatcttattagccgtcttcctgagcatggtcttcatgacaattgtttacgttctcgccgcgatgttcgggaacgttggtaaaggaattgcgatgattgtcttggtgctttccatctctggcggtggcgggaacttcccagttgtcctctccgatcaattcttccagtttattaaccctattttaccgttcaaatacggggtcaacctcttacgcgaaccaactggtgggatttacgcaccgaacctctggcataactttatcatcctagcgctctttgcggttgttttcttcctaattggcctcttcctgaaagatcgaatcaatccattctttgaaaaactccacaaagaagcgacgaagagtaaaattattcattaacgcaaaaaaagccccgccactgttgtggcggggctttttgcatccattagggattaaccttctgtgatttctttttctttgttcttggcgatttcgtcaatcttcttcgttgcttcattcgtcaatttttgaacttgttcttctaaatcatgcatttcatcttcactaatctcgcttgctttttcagcttttttcaagctgtccattgcatcacgacgtgcatttctgatggcaactttgccgatttcagcttctttaccaacttctttagcaatttccttccgacgttcaccagttaattgtggaattactaaacggattactgagccatcgttggctggtgaaatccctaaatcagctgtataaagagctttttcgatatcttcaagcgcacccttgtcataaggggtaatcaacaagacccgtgcttctgggactgtaattgcggcgatttggttaagtggtgtcattgcaccgtaatactcaacattcacgcggttgaccaagcttgcattcgcgcgaccagcacgaatttggcctaatgttctttgtaatgaagcttctgctttttccatgcttgcttttgcttcatctaaaattggatttgccatattattctcctccttcgatcgttgtcccgatgttggcaccttcaacaacttttttgatattgtttggttcgtttaagttgaagactaccaatgggatatcattgtccattgataaagtacttgcagttgaatccatcacttgcaagcctttgttgataatatctaaatgtgttaatgtgtcgaatttaacggcacttgaatcagtgttagggtcagcagagtaaacaccatcaacgttgttcttagccatcaagatcacatctgcatcaatttcagcagctcgtaatgcagccgttgtatctgttgagaagtaagggttccctgtcccaccagcaaaaatcacaacgcggcctttttctaaatgacgaacagccttccgacggatataaggttctgcgatttgacgcatttcaattgatgtttgcacacgtgttgggacaccaatgctctctaagttatcttgtaaagctaaagcattcatgaccgttgccatcatgcccatataatcggcttgcgcacgttccatgcccatttgttcaccagtcacaccacgccagatgttcccaccgccacagacaatggcaatttgaacccctaaatcgtgaactgatttgatttcgtttgcgactactttaacaatttcagggttaattccgaaaccttggtcgccagcaagtgcttcaccactcacttttaagacgatgcgtttgtattttgtatttgacatgattgatatccctccgttgattactaggctcattttaccatatttaataagttatttgggtatgcgattctgaattatcgtaaaactgcaaaaaaaaggagcgcaaattgcgttccctttttgaagcaaaataagcttatttgatttggcccatgacttcatcaacaaagttattttcttttttctcgatcccttcaccaactgtgaaacgaacgaaacctttaacgctaccgttcttagatgcaacaaattgtgcaacagtttgatctgagtctttgatgaaagcttggtcgtttaagctgatttctgacaagaacttgttaacacgaccttcaacgatcttaggaatgatgttttctggtttgccttcgttctttgtttcttcagttaatacttcacgttcgtgatccaatgtttcagcaggaacatcttcgcgagaaacgtattgagggttaacagctgaaacgtgcattgcaacgtcatgagctgcttcatcgtcagcaccttctaaagtaactaatgaagcgatttggccaccattgtgtaggtatgcgccaaagtggtcgccatcatttttttcaactaattcaaaacgacggaagctgatcttttcgccgataacagcagttaagttgattactgagctagcaattgtgccttcgcccattggtaatgcttctgcagcagccatgtcagctggtttgtttttagcgattgtttcagcaatatctttcaataaagctttgaattgatcgtttgaagcaacgaagtcagtttctgagttcacttcaacgattgcagcagtgttaccatcgatggcgatgcctgctaaaccttcagcagcaatgcggtcgctcttcttagcagcctttgccatccctttttcacgtaaagcatcgattgcttgagcaacgtcgccgttactttctacaagggcttttttagcgtccatgatcccaacgccagttttcttacgtaattccattacttgagcagctttaatttcagccataattcatacctccgacaatttatattcaatataattggtttaaaaaaagctgtcccacaagtcaggcagtatttgcgaaacctctaagacagcttatttgaatctactatttagcgtcagtgttagtatcgttgtcgccttcaactgcttcaacgatttcttccattgagtctgctgatttgttttctgcagcaaatgtagcttcttcaacatcatcttcaccttgacggccttcgatgatagcatcagccattttagctgtgattaaacgaacagcgcggatagcgtcatcgtttgatgggataataacatcaatatcatcaggatctgagttagtatcaaccatagcaacgactgggatatttaatttttgcgcttccttgatagcaatgcgttctttacgaggatcaacaacgaacattacgtctgggatgcgaggcatatcttcgataccgcctaagaatttttcaagtttttcttgttgtttcttcaacaaggcaacttctttcttaggtaaacgatcgaatgtaccatcttcgtccattgctttgatttctttaagacgtttgatccgtttttggattgtgtcccagttagtcaaagtcccacctaaccaacggtggtttacaaagtattggcctgcacgtactgattcttcagcaattgcatcttgtgcttgtttcttagtaccaacgaataagaatacaccttcattagcagcttcttctttaacgaagtcataagcatcgtcaaccatgcgaactgtcttttgcaagtcgatgatgtagataccatttctttcagtaaagataaatttcttcatttttgggttccaacgacgtgtttggtgaccgaagtgaacacccgcttctaataattgtttcattgacaatacagccatgtcaacagacctccatatggtttttttcgaccactggtttcacttttttagagaacttgtcgccaagcacctctctagaaatcaaccagtgtgaattattttttggtattgaaataccgtttaaaagtatactaaaaataacaaggcgcgtcaacaagaacttacatgccgcccaattgtttctgataacgggttgcatcttgtggttggtggctcactgaggtaacgccactcactgtttcaaccgctcgatagcccgcttttagcgcgacttgctgactcgccacgttttcgtgtgcagcaatgatactcaactggtcaagttccaattcactggccgcgtattgttcaatggcggctagtgcgcgatgcatgacacctcgtccgcggaaagcttcatctaaccaatagccaacttcacccgcacgattcaagtcgtcaatattgtggacatcaatcgtaccaactaactggtggtcatcccaaatcgttgccatccaaagttcctggtttgccatttgttgttgcgcatattttaaaaagccaagttcatcggccactgattcgatatcgcccacccatggtaaccaagtatcgagattgacgcgattttgatccactaactgaaataacgccggcgcatccgcttccgtcacaggttgtaaatgaatgtgttgatcgacaactaacttaggttgcatattggtctctccattctaaaattgagttcttgaaatgccatgttccattaaatattgttcttttttgcggcggggttgatgtttgaacgcatactctgctttaagcgccgccgatttatcactaaacgtttcaaaatataataaccgcactggtcggcgcaattttgtgtacttcgcacctttgccagcattgtgcgtggcaacgcgtttggcaacgtcggtcgtgaaccccccataaaaactatgatcggcgcagactaatacgtaaaaataataagccttctcagtcattgtcagccatgaataacttcgtgcgcatctctggtgtatagtggctgtcttggtcataaatcgtcagttccggaagcattcgtaagcccccttttttaccatctttgaccgcttcaattaacaccatattcgcttctttgcctgctttgggataaacaaaccggacgcgtttgggttccatgcgtgcggcgcgtagttcgtcacagatttctaagaaccgttcgggacggtggactaaataccctttaccattcatctttaacaggccactcatggtttgaaccacagtgcgtaagtccgttgcaatctcatgtcgcgccagtgccagatgttgattgggatttttttgactattgggttcaaccttaaaatatggtgggttacaggtcacaatatcgacgctgtccttatgaatcttagtgttaacgtctttcaaatccatattgagcattgtcacctggtcggttaagtcatttaattcaattgaccgttgtgccatgtcggccaaccgttcttgaagttcaacaccgataatttgaccatttgttttgggactcatgaataatccaaccgccccattgcctgcgcacaaatcgacaatcgtcccgcgttttggtaactgggcaaagtcggctaacaacaccgcatccatcgaataggaaaagacggatgggctttgaataatctgaatatctaagcgaaataattggtcaattcgctcatctgcttttaacatcgttctaccttcaacctcatttgtatttaggcatattataacaaagagtatcattatttggtataatgagcagatactagtcacgtttgaaaggaatctaaactatgtttttctcatttgcacgttttatcgtccgcattttagcctggttattgaatggcaatttgaaggtcgaaaataaagaagccctgcctgaagggacttatgttttagttggcccgcaccgaacttggtgggatccaatcttcttcgcacttgctgctagtccccgaaagttcacgttcatggccaaagaagaactctttaaaaacccaattctacgcttcatcttaacccacgcaaacgcatttcctgtgaaccgaacaaatcctggcccatcggcgattaaaacaccagtgaaagccctccgctcaaaagaactttcgttaatcatgttccccactggtagccgctattcaagcgaacttaaaggcggcgcggtcgtaattgccaagatggcgcgggtcccactcgtaccagcagtctaccaaggaccattaaaattctctgatgttttaaaacggaaaaagattacgattcgttttggtgaaccaatcccaatcgatccgaaattaaaactcaacgaagaaaacttagaaatcgtcaatcatcaaatgcaagctgcatttgaccaaattgaccacgaaattaaccctgattttaaatatgaactacctgataaaaaataataacaaaaaactgctagatgatatcatctagcagtttttttaacgcgttaaattcttaaccgcattcgtcaccaatagatagaccgtaactaatgccactgcaatccagccaaattgtgttggaatcgcttggaaatcaacggcttgtctaagcggtgtcaataccagaatacctccaattaacaaactgattaaactccccaagtaaacacgccaatttgcgtgatccttgaacggtgatgctggtgtccgtaatacataaaccactagcatctgcgtcaataaaccaacgacgaaccaactcgcttggaaagccccctgttgagctgatgtttgcaggccaaatccaaaccagagaatcgcaaacgttaaaatatcaaccattgagctcaacggtcctagaataaacgcactcttcagtaagcctttagttgcccactgtgttggttggcgcaattgatcttcagcaacccgatcccaaggtaaccagagttgggcgacatcatacagtaaattctggacaagaatttgcagtgacaacattggtaaaaatggtaaacagatgctggcaaccagcacgctcaaaacatttcctagattagaagctaacgtaatccgaatgtacttatacatattgataaagactctccgtccttcaagcaccccgtgttctaaaacgttcaaatctttttccagtaggattacatcgctagcatcctttgtgaggtctgcggcattatcaactgaaatcccgacatctgcttgtttcaaagctgtcgtatcattgatgccatcgcccatgaaaccgacgacttccccttgtgcttgtaataaacggattaaacgcgctttttgaagtggagccaatttggcaaataatgcttgctcggttaatagctcactgacttgtgcatccgttaacgtctctaacatctcaccagtggtcacagctagattctgaatgcccactttttgggcaacttgctgcgtcgttaaagcactgtcacccgttaaaattttgaccgccacttgatgagcttgtagttgttgaattgccgagatagctgattgttttggtgggtccaaaaagcccaaaaagccggcgagaatcaaaccttgattaccaacgcggtcaattgatgccgtctctgctaactcatcttgataagcaaccgccagcatccgcatcccttgttgtgccaaacgatcatgcactgccactaggttctgcttttgcacttcagtcaacggctcaatctgatccgctaacctgacttgggaacacgttgctagcacttcttcaaaggccccttttgtcactaattgattgcctgcatggtttttgagccagaccgttagccgccgccgctcgaaattaaatggaatctcgcccaatttttgatatggaaagtcatcattggtttggtcttgttcatagtaatgaataatcgcttcatccagaaggttctgccagccggattgacccttggcgttcaaatatgctaatcgcaaaacttgcacatcccgctcgcctaaaatatctgcatagtacatcaatttaatatgatcttccgtcaacgtccccgttttatccgtacataaaaccgacatcgccccgagattctgaatggcctttaactgctttacgatgacctgttgttgacttaaaacgacactgcctttcgccagattactattgacgatcatcggtaacatctccggtgtcaaaccaactgccactgcaatcgcaaagaaaaacgactgttgccaatctcccttagtcacaccattaatcacaaatacaaagggcaccaaaacgagcatcatgcgaattaataaccaactgatgtgttttaaccctgcatcaaattgattcggtcgcgacttaggttcagtagtcacaattgcgctaaagcaagtcgcttgacccgtggcaatcactaacgcggtagcttgcccattgacaacggtgctgcccatcagcaataaactcgccatatccgccgcattcgttacgtcagttgcttgcgctgttatgcgtttgctcacgggttttgattcacccgtcaaagaagattgattaatttgtaaatcatggctcgccagaatttttaaatcagcattcaccaaatcccccgtctgcagctgcacaatatccccaggtaccagactttgtgcggcaacttcagttggttgaccctcaattacaacccggctggtctttgccaacatcgcttgtaaagcaatgctcgcttgctcggacttgcgctcttgcacgaatcgaatgctactagacacaacaatcatgattaacataactatcgcgccatcaatatctcgactgagccaggagatgatcattaagacggctaatacgccgataaacggatcttgcacgctctgccaactagctcgcaataacgaacgctgttgccgcttttgaatcgtattttccccataggtttgtaaccgtgctgttcgttgctgccgtgataaccccttcttgtcagtttcgaaatgttctaaactcgcttttggcgttaattgattaatctgattgagtgtcattttaattgtcttagccatcgtaatccctctcattcgcagctgatccgcataaaaaaggcatcctcaaagaaaggatgcctcacaagaaaaacaagccattccaatcgttgagctttagcactatatgacgtagaactttgttcagctacattagaaaaagccttcagggcagtttctgttgactcaattggcatctctcgatgtttctgagtagcagcgtttgttcatataggagcctcacctaacggattagcgatatcaatatatttatatatctatcatactaaatcgacttcaaaatacaattaaacagacttattgaagatattcatttaaaaattgcgcaactttattacgataggttgttggatctgtagccaaggcttcaccatgagctgcccccgaaaccacccagagttgtttaggtgcatgcgccgctttgtaatttgtatacaccattttggttggtacaaatttatcttgatcgccatggatcatgaagatcggcaatttcgagttagctaaactcttagcagtatcgccatcattaaagttatagccggcgcgaacccgtgccatccaattcgttgtgtaaaataacgggaatttcggcaatccaaagagatcgtttagttggtatgcgagttcgtcagcgatgctattatacccacaatcttcaatcaccgctttcacctgcttaggtaatttttcacccgcggtaaacatgacggtcgcgccacccatgctgaccccgaaaagggcaatttgactatcctgtccgttggtagcgacaatttgttgggcccacttgacgtaatccaagcgatccgtccaaccatagccaatggcatcgccttccgattcacctgctgcacggtcatccggcgcgagaacgttgtagccaagattgtgatacatgtgaatatagcgtgccatatcctcttttttacccatatagccgtgcgcaactaaaattgttttgttcgtaggttttgttgctggcacataaattgccgccaattttaaatcatctgtggcagattgttgatgccactttgattgtttaacattttttaaccaacgttgattgtcttgatagactttcgttggcttaccaccatttaaaaatgatttttgccccggtacaaatgcgtattgatacatatacatagtggcaccaaatagtgctaccaccactaagacaacaacgctaattaacgaccatttcagccagcgtcttttcttcatgtgctaaattcctcccgatttactccgcaataataatagtcgtgtttttttgaaactgcttattcttcactgccaccattttggagttgatacatttcataataacgtcctttttgagccactaagctatcatgattaccccgttcgacaatctgcccttgatctaaaaccaagattaattcagcatcgcgaatcgtcgatagacggtgcgcgatggcaatacttgtacgtccttgacgtaaccgagcgagaccagtttgaatcatcgattccgtttccgtatcgatattagccgtcgcttcgtccaagaccaagattttaggatttgtaaccaatgttcgcgcaaacgaaattaattggcgttgtccacttgaaaattgggcgccaccttcaattacacgagcatgatattgaccaggtaattgttcgataaagtcatcagcttgcacgaattcagccgctgcgcgaatttgggcatctgtaatctcttgattaaataatcgaatatttgatgcgacatcaccataaaacatgaatgcatcttgtaggacaagccccatcttgcggcgcagttctgctgtctgaaaactccgaatatcatgtccgtcgattagaatctgaccttcataaaattcatagaaccgcatcatgacattaataattgaacttttcccagaaccggtatgcccaactaaggcgacagtttgtccaggttcaacaacaaatgagatgtcatgcaaaatttcatttttcccatcgtatgaaaacgaaacatgcttgaattcgacgcgaccctcagtaatttcatttgcagcatcggcattttgagctggcgcatattcttcttgatcgagaattctgaaaattcggcgaccagcgaccattccatcttgtaatgatgataaagaatccatcatattggtcatcggattaaagaagttcccaacataggttgtgaacgcataaaccaaacccgccgtgacaaagctatgcagggctgagacaccaaacaagctcaagacaacgaccaatgccagtgtatagagtaaattcacaattggtgcgagcaacaacgagttcgttcgaatcatcgcttcgcgcgtttttaaatagtccgcgttaacttgttcgaattcgtcggtcaaccgtttttcctggcggaattgttggataatcgtaatcccttcgattgattcgttgagtttcgtattcaactgactcaatttttcacgcatatgccggtaaacccgcgcactgtaactactgtaataccagataacaattaacaatattggtagaaacgctgccgttgcaagggcaatttttggtgaaattaaccacatcgcaatgaacgctgaaatgattgaaaatgaaccgactaacaaggataagaaaacattccaataatcaatcaaagtcatcgtatcattcgtgacccgcgatacaatcgagcctgctggcgtctgatcgaaataacgcatcccgagttgatggagcttctgaaataaatcgcgccggacatcttccatcgcgcgttccgaacccattccaaaaaggaaagattggaaaaattgtgtaatggctttgagaatcacgcctaaaccgtacaacgccgcaacccccattaaaacttgggtggtcgcactctgattggttaagtaacgatccataaagacttgtagtaatcgtggtaataaaatattgatggtcgctaaacctgcggcggccacaattgcgccgataaattggcgtttatagcgtttcgtataaccaaagaggcgtttcatgatgtgcaattgctctttcaatggaactttcttggaccattctgattgatattgcttggccatcttatgcacctcctaaggcttgacttaattgttgcttcaaccacatctctgcgtaccagccatctgcggcaagaagtgcttcgtgtgtcccacgttcggtgatttgaccgtcatccatgacaatgatttcatcggcgtgcatcacactactcaagcgattagcagtgataatggtggtttgatcagcccgcatcgttttcaaattcattaaaatcgcttcttcagtctttgcatcaacggctgatagcgaatcatctaagatcagaatttctggatcagtcataatcgctcgcgcaatcgcaattcgttgtttttgcccaccagataacgacacaccgcgttcaccaacgaccgtttcataaccttggacaaacgttaaaatatcatcatgcaccgcactcgaaatcgcggcatcttcaaccgccgcttgatttcggtcaaaatcagcaaaccgaatattgtcgcggacatccgttgaaaataagaaattatcttgtggcacatagccgatactatcaagtaacgcatccagcgaataatcccggatatcgtgaccatcaatttgaatctcgccttgatactgatcatattcacgcaataataatttaatcagtgtggttttacccgaaccaacttttccgacaatgcccaacgttttaccttgtggcagagtgaacgccacctgtttgagcgttggttgtttttcgccagggtacgtaaatttttgaacagcataatgaatatcgccagttgctagtgtttgaatcgcatccggtgcttcgacaatggtgctggtttctttcaaaagttgatcaacccgatcataactcgcattgccccgttccaagacgttgaacaagcgcccaatcgcaaacattggccaaacaagcgccgcgatataactaatgaacgaaatcaattgaccaatcgaaatgctgtgattcataaccaacgtcccgccataaataattgttacaatgtacgttaacccgataatcaaactgatggcgggatcaaataaaccatcaatcatattcacacgtttattaatcgcaattgtcttcgtgacaatctcgttgaaatctttaatatcagcttcttcttggccaaacgtttttaagactttaatcccagagacactctcttgggttttatcattcaaccgtgaaaaagccgcctgtgattgcccaaacgctgtgtgtaaatgtgcacctaaccgtcgtgacgcaacggccaacaagggcattggaatcaaggccatcaacgttaagcgccagtcaacgaaaatcaccatcgcaataatcgttgtcccaccagtgatgattgaatcggcaaaggttaaaataccggcaccagccacttgttgaatcgcggttaaatcattcgtggcatgtgccatcaagtcacctgtccgatgtttttggaagaaggtcgtgtccatcttcatgaaatgccagaacaatcgactccgcaatgtccgttccagtttagccgcgccaccccaaatccgggtccgccaaccatagcgaaaaatatattgtaaaatcgctgcgcttaacaagacgccgagccacatgattaatttttgggccgttaattgtttggcgtccattaaatcaaccagggtcccaatcacttttggtggcacaatttggacaatcgccacgaggactaaaaagatgacgccccataaatagcggcggtattcttgtttaaaataccaccctagttttttaaaaattcccatgttgtgctcctatcctctaaaattcgataagtcctattataacaatcttaattaagccggacaatcatttgtatttccgttcttattatgataaaaaaagagcttctaacaaacgacttgttcgttagaaacccttttaaaaccgacttgactgttttattttttgttgctacgtttttgttgtgctttcattgagctcatcatctgatttaatttcttttcagatggtttttgacccatttgcatcatcatagcctttaacatttcttcattaattggtggattgtcttggaaatacttcttcatgtaagcacgtgcgccaaagaaaccagcgactgcgcctaataaagccccaatgacaaataataaaatgcctaatcccatatcttatgcaccccttcctaattcagttcacttaaatagtttacacataattaacctaaaaagaaagcggaattctaagattaatcgtcacgcaagcctttttcccgttggatatccttcactttttcaggagtgacttccttaccttctttgtcatacacttgtagcatctcaacttgtgagcggaaactttcgcggaaatcctttaaataggcatcgcgcagtgtttgacgttctgctgtttcagcttcagttagtccttcagcttttgctttgtgtgctaattcattaattcggtctaatcgtttttgatccattgccatcttgttgccctccaattcaaactatttgtctattttggactaaaatccgtaaaatgtcaaaaaacacgaacgcttgtttgaaatcccgctataggtatgctaacatatagctattagaacaaatgaggtgctcttatgacgagaacagaatccaagcaattagaggtcttgcgttttatccatgaccgcgttcaagataaaggttatccgccaacggttcgtgaaatttgcgaagccgttaatttatcctctacttctaccgttcatggccatttagcacgccttgagaaaaaaggctttttacaaaaagatccgactaaaccacgtgccattgaattaacagcagctggtttgacagcaattggtgcatcacagaagaagattccggttctcggtgttgttacagctggggtgcccattttagcggttgaagaagcgaccgattatttcccgattccaccaagtctacaaactgaacaagatttgttcatgttgacgattcgcggcgaaagtatgattagtgccggaattttagacggcgatgaagtgatcgttcgtaaacaagcgactgccgataacggtgacatcgtgattgcaatgactgctgaagatgaagcaacttgcaaacgattcttcaaggaacctgatcattatcggctacaaccagaaaacgatacatttgaacctattattttgaatgaagttagcatcttaggtaaggtcgttggcctataccgcgacagaatgtagctatcaaaaaaggattcgccgttatggcgaatccttttttagcatgttccttcagccaggtccttacgtttagcgactgactgacgttacattttttcttaacgtgctttctgatgcaatttcttccgtctagccacgtcccgcaaacaacccgattgcatcggttattcaccaacctaagttaatgctcagactctcccagcttagaaagacatccattaataatccattaatttgaagatatcgtagtctttaattttttcgcgaccgtttaaatcgtttagttcgattaaaaaggctgttccgacaacaatcccacctaattcttcaaccattttgatggttgcggcgattgtgccgcctgttgcgagtaaatcatctgtgaccaacactttttgaccgggtttgaccgcgtctttgtgcatgtataatgttgattcgccgtattccaagccgtaacttgctgagacggtttcgcgtggtaacttcccctttttacgggctggtgcaaaaccaacgcctaatttgtaagctactgggcagccgacgatgaatccgcgggcttcagggccaacgatcatttcgacccctttactctttgcgtattcgacgatcttgtcggttgctgctgcatatgcttcaccatcagacatcaaaggtgagatgtcacggaatgtgacaccttcttcagggaagttgggcacacttgcaacgtaatctttaaagttgattgccattttaaattcgctccttaactctttcaacagtttgctactgattgaatcctgccagccagtctttcatctccgcgaaggttgagtaaacaagctgcttttccatgtcaattttagctaatcgttgttgataactcggtgcactttctaatgcgtgcttttccggttgttccgcggccgaaatgagaccacattctattttaacaaatcctaagtcaaaaaacacctgcaacataaaaattaatagcggcaatttaatttttagataagtcgctaattcccctaaccgtgctttttcaattcctggatgttgacgtaggtaaaccaagaaagtcgcaaactgtttcttatcaggaataccatcaagatatgccgaatacttactatagaagataaagctgattttagtggcctgttgttggcgataaaaggcttcaaattcatctaaatcagttggttcatcaaccacaatcaattctgcttgctgtgcgacatcggctgctaagatggcttggctgccggctgggatataactttgtagctgtgccagatgcttctcattgaaaaagacataggtgccactagctttaaacaactgttgcgtcaaccgattactccgttgatcgattaacacttgcccactcgtttgtaaatctttcagcatcaattgcaacgtcgtattgccgcgccaagtattctcacttagttgaccaactaatttcaactgttccaccgcttgtaaatcgtcgtacaacgcaccacggttaaatgctaagactgctaactgcgcttcttgatcaaccgccgtaaatttcaaatgcttctgatccgcaccgatctgcttcacattggtgacggatggcaccgtcatttcaatcaaaggttctgggttatccgtgccataaggagctaattgactgatggcttgataaacatcgggcgtcacatcagctaatgcgagttgtaaatcaaccgccaatgtgggtttcgttgttaaatcaatctgattatcagcggcataagtattcatcgccgtttgtaaagcagccaattgatcgactggcatcgttaagccaacagccatatgatgcccgccaaagtgcgtcaacaatgtgcgttgggcatcaagcgctttaaagagatgatatgcttcaacacttcgtcccgatcccttggcttggccagttgctagatcaattgctagcactaaagttggcttaccggtttgttcaacgatatgactcgccacaatccccagcacaccttcatgccagccttcatgtgccaacactaaggtcgcactagcttggttctcaggtgtttgtgccatttcgctagctagcgcagtaatttcttgcacaagaccctggcgctttttattttgttgttccacaaattgggcctgttccaccgcttgttcttcatcgaaagtcgttaatagattaacacctaagttggcatcacctaagcgaccaatcgcattcaaacgtggcccaatcccaaatccaatcgatgtggcgtcaagcgtttcttgttcaatacccgctgactggcaaagagccactaaaccgggacgactggtattttgtaattgttgtaagcctaagctaactaaaacgcgattttcatcagtcagtgacactaaatcacagaccgtcccaatcgccactaggtccaaactctcgtaagggatttcttccaataatgccgtagcgactttaaatgccaccccaaccccacataaatcactaaagggatactgtccctctggatgacgggggtgaatgattgctgtcgcatttggcaatgtacttggtagttcatggtgatctgtgaccactacatcgacaccgtgttcttgcgcgtaggcgattggctctaagccactcaccccgttatcaacggtcacaatcaactgggtcccattttcaacgagttgcttatagacatctaaattgggcccgtagccatctttaaaccggttgggcacatatacttccacatcggcgcctaaactttcgagcgtctcttgcatcaaagcggtacttgtaatcccatcggcatcgtaatcgccgtagactgtaattttttcgccgcccatcacagccgcttggattcgatcgactgccgtttgcatatcatacaaagcgtatggatcatgtaattgaccgacattcggatgcataaacgcactgattgcctcaggtgttttgattcctcgttgccacaacaattgggctgcggctttcgggagtgcttcaactgccattattgcttgtaagtcttggtcagttggtgttgcttttaattgccattcatattgtgcttccacattaatccctcgctacttccaaatcattaacttacccattatagcaaagattattatatttcgtttaataatccaatcaatgcttttgtttatcagtccaaatgatatactgttaattgatacacaaggttattacatagggggaaacaaccatgacagttttagtattaggtggcgccggctacatcggctcgcacaccgttgatcaattaattcaacgcggcacggatgtcgccgttgtcgacagtctcgtcaccggccatcaagccgccattaatccacaagcgcgtttttatacttaatttattttattgatcctttgtttttgagaaatgatcttattgatccgcacgccaaagttttcattgatcacaacaacttccccagttgcgatcaattttccgttcaacatgatctccaaaggttcgtctgttaatttatcaagttcgataactgaaccagtgttaaagttcaaaatatctcgaacagtctttttagtccgccccaagacaacgcttaggtttaatggaatatctaagatcaaatctaagttatcaccgctgatttcttggtgactcgacaattcttcaaattcgggtttagaaatttccacgttactgacctgcgcctttctttgtggttgttcattgcttggtttttgcgagatcttaacttgttgcggagctggttgtggtttactaatagccttggctttctcgactgctggtttctccgcatcacgtttgacaactgttgctttgtcagacatcattgctttcacaatatctttgaccatttccaaagaaaagatctgcataatttcactctcgatcagtccttctacatccaagttaaatgaaatacaataaatttcttcctcacggtccaaagagtcttcattcacatcgccgggattttcccacaaatgcacttttggaggaagaatatcgactttttggttgatcatagtagccatggatgtcgaagctgaaccaatcatttgattcatcgcttcacccacggcacttaattcgacttcagtaaattcttctgaagctgactttccatcgccacccatcatcagatcagcaataaccgttgcatcactgacctctagcaacattaagttagttcctgctaaaccttcacgaaattcaacggtcgtagcaactttgggtgcatggatctggtcgagtaattcaccaaaatggatttttttaacacgtggtgtcgtaattgccacacgatgagtcagaattgatgacagagttgttgctgcctgtgacatggaaatattaccaacttcaccgatcaggtctttgaccccttggcgatctaacccctccaataattcttcatcatctgattgcgcagcttcttgagcatcactgccattcatcaaagcatctatttgttcttgtgttaaactctccgtcattcttcttccccctcgatcttgctcaataactcaattgcgaattgtccattctttttccctggtttgacccagtaaaacggtcggtcttcaatgtacgtatctaacggactggagattttagagtccagcttgatgacgtcacctggttctaatttcaagaaatcagccaagtccatttgggtgttgcccaaaacgacttccattggcagatctattgcgtttaacccgtgttttaattcgctttggtcatcttcacttaattcctggcttgagtcgaaccaattatgcaaactcaatttatctaggataccttcgaatgaaacataaggaatacacaagttaataaatgttgaaactccgaaaagctgtactgtgaaagtagctaatacaactggttcattaggcgataaggactgtagtaattgtggatttgtttctagagattcaagctcaacatcaagtgttaggacttctttccaaactgattgcaaaattttagagaattcacccataacctcatctaataatgttaattcgatatctgtaaaaccatttttatccaaaggcggttgatttttccgattactctccaaatcagcaccgccacacaacaattcgactaaagtcatacatagttggggattgatttcgatcatgtgtgatcctttaaggggagctgctttaaacattccaatcaaagtcacacgtgggatagaatgaatgaattcgtcataactgatctgctcgatcgatgctaattgcatatccaagttagtccgcaagatatttgaaagaacattgccgctcatcttagcgaagtcttcaaaaatcatgtgtaaggtatttatatattctttagatagccgtgtcggccttctaaaatcgtatggcttcgcttgtgattcgtcattttgctcttcatcgatcacttcttcgtctaattcgcccgaatcataggcatttaaaagtgaatcgatttcctgctgtgataacacctgatccacaaagacacttcctctcgctcattagttcattccacaattaaaaaatcttatcattaacgtcgatcacatcagcaatcgtttgttcacccaagtctaccacaccggtaaaataaagggcggcttgatcttcacttagttgaatatcatcaggatcaacatccacaacttcgatcacttcatcgatcaataatccacgacgttcatcatcttttttcattatcataatatttcggtttgtttttgattccggcagtcctactaactgtgccaagctgatcaccgtcaacactgtgcctcgcaaatttatcaagcccttgacccaaagcggagcaagcgggactttggtaatttgaaccgtatcaacaacttcttctacagtttcggcagctatcaaataatgttgctgattcattttaaacaaaatcatctgcattaaaacacactccctttcttaattaaattcagtcaatagaactttaattaagacaatgccttatctaaggctttgatcacccgatcagtatcaaaaggtttgacgataaaatcgactgctccagctctgatagcatccatgaccattccttgttggcccatcgcactgcacattacaacttttgcactgctatcaaattccttgatcattttcacggcctggatcccatccacatccggcatggtaatatccattgttaccaagtccggtttctcagactgataaaggtcgaaggcttcttgcccattttgcgcttctccagcgacctcatagccgttcttttctaaaatatcctttaatttcattctcataaaaacagcgtcatcgacgatcaaaactttatttgccacgcgacattctcctctcaaactccaagtgattttatcattttgtcaattacacccaactctgggatgaagtatagtgaagcttccaagtaattagaatcataagtaaattcatttctgatcaccatgatctcatcaccaaactgttcaaattccatatatgcactactaatcacggcaccaaacatatcaaacgaacttaccggaacttctggttttaatttcttttccagcatcccgccgatcgatgttaaaaatgaacttgaaacaatgttagtcaattcactaactgcagaaaccttaatttcttcggtcacaccttgatctgttcccatcatcaaacttgagatctctttagcggccgggtccgtaataacaaatagcatcgcaccctttaagtcaccatggatgctgcttaaaacggcataaacttcctggtcatcggccataacttgctggtaaagctcgtcataacttaagatattgacttctggaacacgcatcctgatcacactgccaaccatttgtgatattgttgtagctgctttgccgccgccaatattcataacttcttttaacgcatctaattgtatgtttgaatatgccatcttaacccacctgtgcgtctttacagatcgtattgacgtccaagatcaatgcgatcgagccgttgccaaggatcgtcgcgccttggaatcttttgattttttgcaacatcggatcaatcttcttgattacgatttcttgctgtccgatcaattcatcaactacgatcccaaagtctttattatcacccttgatcaagatcatatatttctttccctgatccttttcagggatattcaaaatgttggcagtccggatcactggtgtcaatcctgtctgtaaaggatagacttcctgactagcagtttgtaaaatattatcttcatggatcatttcgacccgttcaacaacatctaacgggatagcaaatgtttcttcgcctagtttgaccatcagtgcctgaataatagacaaggtcaacggtaatttgataactgttttcgtacccacattgactttactgtcaacttccaatgaaccgcccagttcgttgattttagcttgaacagcatccaagccgaccccacgtcctgaaatgttagtgatctttttagccgttgaaaagccaggattaaagactaacatttgcagctctttatcactcataccggtcgtatcgattccacgctcttcagcggtaattttaaggacttgtggatcaaggcctttaccatcatcgctcaaagtgatcatgaccttatttccttcttgataagccgataattttatctttccttcttccggtttgccaagtttctttctgttttcagcatcctcgatcccatggtcggctgaatttctaactaaatggatcaagggctcactgagttcggtaaccacagttttatctaattcagtttcttcgccctcaatttcaagagtcatctttttatttaactggttggaaagatcgcgaaccatccgtggaaaacgactaaagacaacgctgacttgctgcatccgaattttcaaaaccaaatcctgcagttcagatgtcaagcgtgaaacctgttctaaagattcatgcacttcttctaaattttggcgactattggcatcttctagttgattgcgataaacgaccaactcagatacaacattcaaaaaggtatccaaccgagaaagatcaactctgatcgactgatttttggcatttttttgatgcgaagtgctcttcttagacggggcttttgctttcttaggttcaggagcagcgctttttttctcagtagtattttctttgtcaacagctggttgtgcgtctttttgtggttcttcagcggctgccttttgagttttctcatcgaattctgccgtcaaaacttcagcgatctcactactagattcaatgatcttcttaatgtcatcttgattactttcagttaggatcaacaatttgaaatctgtatcaaaattgccttcttccagctggtcaggagccggttcaatgtgaataatatctccttcactgtcgagcttatcgatgactaagaatgctcgtgggcctttcagcattgactctggatcgattcgaactgccgcactgatcacattaagatgttgtgttttagcctgttcgatcactgataagtcagcttcttctaaagtttcaaatttcagttcgagctgactatcttctggagctttcttctcatctacatttttatcagcggtttttgtttggccgccatctaattcattttcaactttatctaattcattccataattctgtgatctgatcttcgctttgttcttcttcatctcgcaagccgtctagaagttcggtcaatttatctaagcaccgaaaaatcagagaaatatgatcacttgttaccttcaacttgcctgatttgaaaagatcaaaaatatcttccattttatgagtcaacttgctcatgacagtatatcccatagttgctgacattccttttagggtatgtgcagctctaaaaatttcattgatcaaatcgatattgtctggttctttttcaagttctagaatattatcatttagttgtgttaaattatcttcgctttcttcgaaaaagatatcgcgataaacactattatcgtcagccatcaatgatccccccattcaaattatttacacctaagcacgaatggtctgtgcttattgttaaagtccgctaatgctcgacttttaaccggctcactccaccttgttttcttagtcaggttgcttgagacagaaagctccgcctatccaacattagttccacatcgcaaaatacgcaatctgaatctagtgtccgatagtgctcactttctcccgtctcactcaccttgtttctcatatataaacgactctattttctttaaccccagcttttctgcgctgttaagtgtttctgttgctcccgtgaacaatattccacctggtaccagcgcctcacttattttttgataaactcgatcgcgtgccatgggtttgaaataaatcgttacattgcgacaaattatcgcatgaaaacctgattcatactggtcagccaataaatcatgtttcttgaacgaaactcgttgtttgacggctggccctatttgatactggtctggtcctaatgacttaaaatatcgtctaacatcagtatcagaaatattttttaactcatttgtcgaatactgacctaaacgtgctttctttaaaatgtcatcatcaatatccgttgctagaacattgcccataagatgatttttttctaagatcatcgctaaggtgtatggttcggcgccggtcgaacaagccgcactccatagtttcaaattattaaattgtggagcaactttttctaacaaacatttttcaaaattactaaatatttcttgattgcggtaaaattcagtcacattaattgtcaaatgctcgataaactccgctcgtttgattggatctttgtccaaaaggtgttcatattcatgcaacgagttgaccccgtttttatccataatatttttgatcctgcgttgcatttgtctttctttataatcatcgagatggatatgatatttctgctccacccacctattaaaatcagtaaaattttcttccaacattttaatttcacccaacgatcgtctgtagtattttcccgatctcatgcaaacttacaacttcatcgacaacttgagcttcaattgcagatcttggcattccaaaaacggtacaagattcctgatcttcagctattacataaccgccttcatccatgattgtttgcaatcctgccgttccatcatgccccattccagtcaggataaaagctgttaaattagcaccataatgagcagccgccgtttcaaacaagtaatcaacggctggccttgtcccatgcatcttcggacgttgatctaacttgagccggtcaccttggatcgtcatgtgataattaccaggacacaagtagatctgatttttgaccagcatattatcactagcctcaacgactgtagcgccgctttcttcatttaaacgctcagaaaacgtgcgggtaaatcccgctggcatatgttgtacgataaaaacaggaatgtttgtatgactcacacctttaataatttctaatagtgcttttggtccacccgttgatgagccgatcacaacggcttggggcctgatgttacgctttttatgtgctccgttgggtttggctttatgattggcagcaactggcggtttactagaacgtccgcaaatatttttgatctttgcatacagttctctgacccactcgtcttgaatttccatcaggttcacaggtttttcgataaaatcggccgcaccatattctagagctttgatggttactgcctgatcactgactgcacttagcattatgaccgggatagaataatcctttttgatctgtctaagggcgctcaagccatccataacaggcatttcaatatccattaaaattaagtcaaaatcattatctgcatcaaggatgtccaaacaatttttaccgtttcgtgcaattcgaaccgttgaaacactgggcattttattcaatatatccgagatcactttgcgcataaatgcagagtcatcaaccatcaaaatcctattcataaggtataagaatcctttcacatctttacttttctctcttaaacaacattctcaagtcatcaatgagcaaattttcgttaattaaaaaacagtacatagtttttaaatgtatctattttcctgtctcacgaccctgatcaaggtcgaaaaatcgtttaaatcgacgaccatggtccttccgctgctgccgcccgtatcttggccaactaacgggatctgcaggcttgccaactgatttaaaacagcgtcaacatttctctgaccaatattagctgtcgtgaggttgtttttaaatccaaacatatttgcaccaccagagatcttagcttgaaatttagctcgtggtgctttttgcttaagttctttgaccatcaggggtaacgccgtattggcatacttagccaagttcaaacctgaagtcccgttcttttcaaacggtttactatcagggagcataatatgactcaatccaccgatttttgaaactggatcataaacgatcgttccaatacaagaacctagccccacggtcattattttattaggcgcgtatgaaattttataatcagagattcctaccctggtttcgttagtgttctgcagcatcatccgtattctcttctttttctgaattttcagtaatggaatctacggatgaaatgatctcctcttcttgtgaagagttgaaaagataatctaagttcaactcgatcactacttcatcgcccatcttcaaaaattgactgatatacgggcgcttcagtgatgatctgtccaaatctttttcataatccgtctcagtcagcgacatgatccctacgatctcctcgacaaagatccccatcgtccgttcgctccaatgtgccaagatcaccttagagtccagcgttgcaggcgataattcgccgtaaagccgcttactaagatcaacgattggcaacatctgttcttgatattcatacacacctaatacatagtctggcacttccggcaacgagataaacttttcagtttcgatcactcgtttacccatttcaactggcaaagcaaaaacttgcttatgacttttaaaaacaacatattgtcccatttttgtacccctctttaacttctacaactaagaattgacgctgctagttttttaatttgaaactgccgatttgcaaacgtctgatctcatcagcttgttgaagctgttcgacacttttttcgagttcttcgatcaaggaataaaaatcatccaagttagccgatacttcctgtgtacttgcagaagtttcagcgatctgtgaatccatttgctgaatagaattattgactgcatcttttttatctttgatctcatctgcatgtgaactaacatcggttaggccatcgctcaactgcgtgacatcctcggtgatttgttcgctagccttcagtacaccagaaatattcatctgctgttgctgactgcccttgtatgatgcatccagatcaacagtcattttcttagacttagcacggatcgattcgatcagttctctaatattagtggttgatttgccggattgttctgccagatcacggacttcctcagcaacgattgcaaagcctttacctgcctcgcctgcacgagccgcctctattgaagcattcaaagccaacaaattagtctgttctgaaatatcattgatcaactgcacgatattgccaatactttgaatatcttgattcatcgccgtcatttcagaaacaatcttcttttgactttctgtttcttggttccaagaccgtgaaacttggcgcatcatttccatgttttgaatattactttgctttgattcgtcagcatagctattcattttttcaattttctggcgtatctcttcaatttggtcaccaaaaacattcatttgagcaactgtactttgagaagctgttgcttgctgtccagcattagtagcaatagtccccatcgcttgacggacaccatcgatcgaacttttagcgtgcgtcgattttccacttagatcgttgaccattgtttccgactgctcagtttcttccttgatcccagttaataaagctgaaaatgcattggctaaaccaagcaactggtcacgagttttaataaacattgggctttggccgggaactttgccgatctcgtcgatctgactgaaatctccctctaccatcttaccgacctgaacagaaagtttttttaatccgccggcttctcctcctgttactgccgtatttttatgaccaaatagtacatacaagagatgcaaagcgactacaatgaccgcgagtatccaaaaccttctcatctccgctgtctgtgccgaacttaaaacaaaagcccgaaaaacaattaaaacaatgactgtccctaaaactggcaagaaagctacttcggagttagcttttttagccgtcttcttacgtttttccatttgttttccttccccatataaaagatttggtatctgtcataatactcacttaagcaaaacgacactccaatctgttatatcggttaaaattttatttttttaaccgtttaccaaacatagacatcttttggatcagaaaatcttgaatatccaccgtctggatcatctcggatcagttctccattttttagttccaaagttcgatgacgcaaagaattaaccatggtactgtcatgtgttgctaaaatgatcgttgtccccatctgattcaggcgaaagaaaatttgcatgatctctttggccgacttaacgtctaaattagcagtaggttcgtccgcgataataactggcggatcattcaataacgcacgagcgatcgcaattttcttttgttgcccgactgaaagttcctgaggcaaccgctcaataaatagcatcatttcgacactggtcaatacctctgccatccgctcttcccacttttcagtggggatctctagcgctgacatacaggtttccatattttctttgatcgtcaatcgcggtaaaaaaaggtctttttgcgaaacgatccccaattgacggcgtagtttgtatatctgttcatttctcaaatattcaatttcaatattgccgatccgggctataccagaatcaatggagcgttgagcacttaagatctcaagtaaagttgttttcccagccccacttggaccaactacataaacaaattcaccttgttcgatcacgcatgaaatatttttatttgcccaaacattgccatatttttttgttacatttttaagttcgatcaattttttctcctaaatcagtcggtaaagtggttgatggtctccatcatttcatctgtagatgaagcagcgcgggcattcatttggtaagacctctgtgctgttaataattctgtcatttgagtagccagatctacattggaactttcaagagttccttgcatcacactactacctgccccagcggctctaaaaccgccattggctaaatacaagttatcaccaactgacaccaatgaatgtgcgttgtttggttcaaataaacgtaaagaccctaaaacctgatcaccggatctgatcgttccgtctgaagaaactttcaagtcccctgctggccaattttgttctggcacccgcgcgtcaactgcaacccgatagccgttgctggcgatcaaaccaccgttagcatcacgatgaaagtctcctgccttagtcaagtatgtattaccatcgggaccaatgatcccaaaaaaagcattgccgttaatagccatatcaagtgcacgaccggtcgtttcaaattttccgacttgatcatcgactcgtgctcccgcggcatttagaccagtattcgaatcaactcttgcattagaattaccaagtgcaccgtcgctattagttaaattattattcatcagctcattaaatgaattgatgattcccttatagcctactgtgttttcgttagcaatgttatgtgaaacattatccagattattttgcaagccgttcaaacctgttctgttaatggataaaatagaattcaagttcatttttacttactctcctcatttcctacatgatctgttttctcaagcctatactaagtaccatcaagactcactgtacgcctgagaaaaataaccaactatttgatctagatccgacctagttggttgactgccttatccaaggtcgaattagtagctgatagcactttttgttgagcctgaaattggcgcccggtttccattaatgagaccatctcatcagcagtagaaacattagaattttcaagcattccagcttggaccggcaaatcaatttgctgggctccctgcccggtataaagcgttccgccgacattttgaagttgtgcatttgctgggaaagacaccaccatcaaattttgttgtgcttgctgggcatcaactgggccgccatttcgacctatcacttgaaaaccttcttcagtgatcagctgaccggcatcattcactgaaaaatgaccatcacgcgtatacgcgatttgaccatttcccattctaacggcaaaaaagccattgccttgaactgcaaaatccgttgccaagcctgtcggttcaagcgagcctttttgcatgtccagagcactgccctgaatttgattgccccatgtaaaaccgccaatctcatggcgggtttcatttttgggaccagcctggttattatgtaactgtgcctcgttcattgttgcttcaaacaaatttttttgcaggtagccaggtgtcttgatattagcgatgttaccgctaatattttcttgttgagcttgcaaaacattaaaactatgtcttaaagtatcaattcctctaatcatcattttcctccataaatccttttagttttccaactgcacgcccatggatctgtgaaacgcgtgcaatagaaacgtctaagaccaaactaatttctttaagtgtcatttcctgttcgtaatacaaactcaaaactaattgttctctttcagaaagcttgctgatcgccgctgccaactcctgtttcatttctgtttccaacaaatgtgcttgtgcatcgcccgtttttttatcacgaaagatctcttgtctgctaggcgattgttctgctgaaaacaagacatcctccaaagagatactagccatataatgcaagctatcataaatatcgttcagctttttctgattgatttggagcttactgcataattctttgtcagtagcttctcgtttcaattcttgctctaattcctgcttagcccgataatagcgagtcaaattgtcaaatttataacgagacaaccgaccgtgactgcggatctcatcaatgatggtcccacggatccgtacataagcataactttcaaatggtactttcttttgtggatcaaatttcttaagtgcatcgatcaagccgatcactccagtattgaagagatcttcgtagtcataatcggagcttttaacagtgatccgagcgatgaccttttcaactaaaggcaaatatttgataacttgatcttccatattcatctcatacaagaaaaaagctcctttctgaaaataccgggtgaagtaattgtcttctatccttgttcttgcaaatatgtgttgcaaattggaatgtgacgcttactttggcatagtttgtctcacaaatcagaatgtaacgcgtactctggcatagtttgtgtcacaaatcagaatgcaacgcatactctggcatagtttgtgtcataaatcataatgcaacgcatactctggcatagtttgtgtcacaaatcataatgcaacgcatactttggcgtagtttgtgtcgcaaatcgaaatgtgacgctttctctggcatagtttgtgccacaagtcagaatgtgatgcatactctggctatgtttttctcacaagtcagaatgtgatgcatactctggccagctatcttcaacacgccttcccacagagtgccttcctaaaattgcaactgcccgactgcctcgatcccgatttcatttgggatctcatttaacgacaaaattgccaaatctgggaagttaaacgacaacaactttctaaacgcagttctagtctgtggatttgtcaaaaggacaaaggaaatattttccaccagcattttttgattcagctgagtgatcgcatccaacatcttattgaccgtatccggctgcaaaacaggatacgaaccagttgctgtttttttaatactctgtgcaaccatttcttcaattttgggatgcacagtaacggcataaattttgttatcttcaccgacatacttgttggcaattgttcttcttaatgcttggcgaacgtattctgtcagcgtttcggtatctttggtgacggtcccataatctgccagagtttctaagatagttgataaatcattgatcggtaccttttcttccaacaaattctggaggaccttttcaacttctcctaagcgtaaaatatctgggatcaattcatcgatcacaacgttgctttgttgcttaatgccttccaataattgcttaacttcttggcgtcccaaaagttcaggagcatgtgagtaaataacttccttcaaatgagtggcgataacagtcaaaggttcgataactgtgaatccttgcaggtcagccgcttctttatcactttcattgatccacatcgcttctaaatgaaaggctggttccacggcttggatgccattaaacgggatctcatccccagtcggactaaagatcatgtatttatcaggataaatatcacccgtgccgacctcattgcccttgatcttgatagaataattatttgcatccaggtacaagttatctcggatcctcactggactgaccaagatccctaattcatgagcagtttgtttacgtaaagcaatgatccggctcatcaaactattgtcgatcgaactatcgaccagcggtatcagtgcataaccaatttcgatcgctaaagtttcgacttggaaatcggctacatcttcgtcttcttggacatcttttttcttttgtaaagccaaagtctgttttcgttgttgctcttccttaactttcttagcatcctgttgtttgatcaggaagctaacaccaagtagggctaaccccataaccataaagggaataaacggaaaaccggggacaagggataaaaccattaagatccccgctacgatccggaatatttgcggattgcgcaacgcatcttcagcaatatctttaccaaacgtactatcattatcagagcgagtaacaataatacctgaggcaattgagatcaatagtgaagggatcgaactgaccaagccatcaccgatcgacagcttgccaaactgtgataaagcttccattgcgctgagatcacctttcatagtaaagatgatcgttccaccaatcagattgactaaaacaatgacgatccccgcaatggcatcacctttaacgaacttgctggcaccatccatcgaaccataaaaatctgcttcacgttgcaggtcttcccgtcgttttctagcctgcttttcatcgatcaaacccgagttcagatccgaatcgatcgccatctgtttccctggcatagcatccaaggtgaaacgggccgacacttctgaaacacggccggaaccgttagtcacaacgaccaactgcacgatcatgatgatcacgaacaagatgatcccaacaatatagtttttcccggccataacgtcagcaaaggcggcaataacatgtcccccatcaccttgtgttaggatcgcacgagtcgatgacatgtttaaacctaacttgaacatcgttgtgatcaaaagtaaggttggaaaagtagtaaattccaagactgagtgagtaaacatggtgatcaataatatgttcatagcgatcgccatgttgatggtgatcaaaaaatccaagactggcagcggaagcggaatgatgatcaagccaatgatactgactaccaaaagtgaaacgatcagatcagctggtttgagcgcattctttttagctgctttttgcttgtttttcatcggttactctctctcctatcaactcaaagccggttcaactttaaccaggcttatattttatacttagcttcttcatccaaacggtaaaccaaggcaatcaaatcagcaactggctcaaaaaactcttctggaataaattctcctgcctcgatcttgggataaattgctcgtgccagcggtttattctcaatgatcggtacatcattttttctggcttcttctttcattttcatggcgacctcatcagctcctttagcaagcagctgtgggactggcgtttctgtcttatcatacttgatggccaatgctaaatgagtcggattcgccaaaacgactgtcgcatctttaacttgggcgatcgaattgcggaccatcgcctgatacttagcttttcgctgcgctttgactttcggatcgccttccatttgtttcatttcttctttgatctcttgtttagtcatcttcaatttcttagtccgactgaaactctgatagccaaaatctgccaatcccaaaaccaacaaaaccaaggcgatctgcatccctagttctttacaaaaattgagaataaaaaacaagatcttggcaggaccaacagaaccagcatttaaaatgtcacgtaacgtagatatgtatttgcgataacacagatatgcgatcagtaagaactttgccagcgtttttcccaggttgactatcgcatccagactaaacatccttttgaaaccacttaaagggttcaaacgtttgaaatcaggctttaatggtttagccgtaaataaaaaaccaatttgcacgaaattccccaaaaaactgatcaaataaccgacgaccaaaaatggtgctgccacgatcaaaaccattaagatcgcctgcaagccaacctttggcaggtctgcatacaagacctggtagttatccaactgctcgataaagcctgtcatataaggaaaaaacttgcctaatccaaattgccaagcaggaataaagataaacgaaaaggtcaataaagccaaagcagctgttaagtctggacttctagcaacatttcccttcttgcgcgcatctcttttacgcttaggggtcggtttttcagttttaccatctttatccatgaaataacctttcctttatcagactatgcctgacctaccgaacgcaggaactcgactagatactcatatgactgtgggattatctttcccaacaattccacgacatttggcagcatgatcaaaaagatgatcattcctacagtagatttaagagacaaacttaacatcagcacgttcatttgcggcacagaccgtgacaagatccccaatacaatatcgatcaccatcacagcaatgatcaaaggtgcagcaacattaaaagccatggcaagggtcttactagtcaaaatgaccacacccttaacacttgcattcgtcaaagtggcggttcctaaaggaacaatcgtaaaagatagcatcacagcgcgaaacaattccagatgcaaatttaacatgaagaaaactgccagtgccaaccagtagtacatccgaccaaattgtgaactggaaacttccattgtcctgtcataagcctggcccatcgaaaaaccattttgaaaatcgatcagggaacccgccatgatcacagcttgaaaaaccagttgactaacatagcccatggcaagccccaataaagtctcctttaaagccgccaaagcgaagataaccacactcatcgccttgaccttgccaactaaaggaatggcagcaactaccaaactccccccaacgatcagcttagcagtattaggaaaacttctttgtgataaaatcggcgctgtgaccataaaagaaaatatccggcaaatcaccaaactaactaattgtacttcggccactgacgtcacacccccgagatcaagcggaagatatattccgtgaattcttttagcgttgtgatcataaagtttccagccaagatcagggtcacaaaaattgcgaccaacttagggacaaaactcaaagtttgttcttgaatctgggtcgtagcttgaaagatactaatgaccaaaccaacgaccatcgcaactatcacgattggacctgaaactactaagattctgatcaccgcttcacgcatgaccatcaagactaatgaaacagacattaagctccccctctaactgaaactatgaaccaacgattcgactaacaagtaccagccatctaccatcacgaataataataatttaaacggcaatgagatcataaccggcgacagcatgatcatccccatcgccatcagcacactcgagacgaccatatctatgatcaaaaacgggataaatatcaaaaagccaatactaaaggctgtccgcagctcactaataataaaagccggagtaagtgtcgttagcggaactgactccacatttttatagcgatgcttgtctttagaaacatctaagaacaatttgacatctttttttcgagtttcttttcccataaattccttaagcctgacctctgaacggttgaatgcttgtttttcagtgatctcctgccgactataaggttggatcgcttctttatagatatctgtataaacaggcttcatcgtaaacagggtcaaaaacaaagccaagccaagcaaaacttgatttggtgggttttgctgcgttcctaaggcacttctagtaaatgaaaggaccatgatgatccgtgtaaaagatgtcatcatgactaacaacagcgggaccacggataaaatcgtcatcatcacaaacacattaacgatctgcgacgaatttccgctctgtccactattgatcaaatcagtaatgccacgagaaacatcatcgaggccagctgcatgcactgaaactggtcggaacaagcaagccgttaaggacaacccgctcagtattttactttgctttttcgtagtcattacttctttctcttattctgcagcttgatcgtcttttgcttgagaatggccgcaaaatctattttttcactcgcttgatcatctgaactggtaaataattgctcaacctcttcttttgataactcagagatcaccgtactgccttgttctgccaagctcatcaagtaatagcgctcgataacttgcacgatcccaagtgcggaagtttttgaaactgggattttcttgataactcgaaattgccgatcctgtggagcaacgaatttctgtaagtattttaaaaataagttgatcaaaacgatcacgataattaatccaaccaccattttgatcaacgacaacgttaactccatttgaatactcctcgtatgatttaacttattggatcacaaaatctgtcacataaacttcttgcactattgaactgccataatttttattaatagcctctttgacttgttctttgacctcatcgatactttgattatttttcaataaatctgcggccctttttggtttcaaaacacggatcatgctgtcacgcactaaaggcatgtctttttttaatgcttttgcttgatcatcgtcagccactaacaaagagacctttaagcgtaaatattgtggatcagctgcatcatccgttgccaaattaacaataaacattttgacgtttaccagacgctgtcttttagaaatggcagctcctgtttgcactttttcagctttaggttttgcgtcttgactattaaagtacttgccggaaatgatcgtgccggcagcactagccccaaatgctaaaacgactactaaaacaataagcaatccccatttgatgccacctgctttagtttcagttgtttctacttcttcattcttcttcattgtttccctcgttattcccttcaaaaagattctcaccagaaaaaattcggtgacgatattctatgatcgcttccctaatttcaaacgctgtgtctctaactaccagcgttttcccatcgacaagcgtgattactgtatctggggtttcatcaattcgatagatcaaatctgggttcaaataaaattcttttcctttaaatgaagttaacaaaatcatgaacctgccccctattatttatcctgtacataaaataaaaattttaccttacaggttctttttccccttttgatcaaattgctgcgctcactattctaggacagctcctcaagccaggactttccgtctaaccaacttccacacacaatgctaaaaaacgcattatggcctagaagtccgttagtactcgagtcctacccggcttacctcgctcactatcttaggacagctcctcaacgcaggagtctgcgcctatctagtttaaacatcacggtgccaaaaacgcaccatgatgtctaaacccgatattgctcgtctcctaaccgcgttgtttcgctcactattctaggacagtttctcaacgcaggaatctgcgcctatccagtttaaacatcacggtgccaaaaacgcaccatgatgtctaaacccgatattgctcgtctcctaaccgcgttgtttcgctcactatctctttaggttgatcaattcttgcaacatctcgtctgacgttgtgatactccttgcattggcctgatatgctctgcttgtaacgatcatgtcagagaattcttgcgctaagtcaacgttagaatcttccaatgtccccgctaataaagtgttggtcccatctgtaccaggtactaaattattggcattaccagaatcctgtgatatttcataagtgctgttaccgatcttgcttaagccggctggattactgaacgtagcaatcgacactgtaccgatcacttcatcttccgcgccataacgcgcagtaactttgccatcaggaccgattgaaacgtgaccttcaactaacttttcaccagctgcattttgagctggtactgtaattcgagttaacgctccgccttcctgtccgggagcatagcccatcacacgtaaaccatcagcattagtcaagttgccattagcatcgatcttcaaagcaccgttacgtgaataaacctgaccattattaccatctcgctcaaatactaaaaacccgctaccattgatatataagtccaaagcacggccagtcgtgttttgaataccttgacccatgtctgtatcgatcgcaccgacctgaaccccaagtccaacttgcttaccatcaataccgccaacggttgcacgtggtcctgaagcattcgcagttgtctgacttaaaatatctgaaaagttagcacggcttgacttgaagccgatcgtgttcgcattagcaatgttgttggaaataacatccaacctggtttgttgactcttcattcctgaaacacctgaatacaatgaacgtaacatttaaaattcctcctatttgtgtagcatctttttaaattttgctattttttaatcttttggttctctaacttctttgatggcacccatttcatattccgtaccgttgacggtcagcttggcaataccgccagtaaagttgactttatcaactcttccttgcttttcattgccttgttcatcaacaactgtgacatccttgcccattaaattgaaagcttgttgttgctgccctaaaagcaaagaattattcatcattgtcgacatattatttaattcctgtaaggtagcaaattgtgccatttgtgaaatatgatctgtaccactgctattggaatctccatctccggtcatggaagggttagacattgatgtcgctaagatcttcaaaaaatcatccattgaaagtcccaaagcatttttagcagcaccgttttgtgaagtactttttgttatctcactcgaactgccaagactgtttgcttgtacaccgcttaaattgtccatgaaatatattcctcctttgatcacgcatactctgagacgctcaaaccaacaaactgatcgttccgtgcttgatttgttcttcgcctggcaaatgttcttcactgaccacttgtgtcctcgtcttgtgcgaacgtgcaaatcggcgttgctgttcttgctcattttgcatgaaatcaccagctggaccatctcgctgctcgcctaaaagttcagaagtttccgccgtttgtctcacagtttcaacttgtttcaatgttttagtcgttggatcaagctgcagctgctccatgatctgctctaatttatgtgtgattttttgtaacatatcacgtgcagtactattttgaacttcaaattctaggctgactgcctgttcattcgtctttaccgcaactttcatctcacccagattagccggtttcaaattaaaaactatgctctgggtattgcccttactggataacaagcttttctcaactactggagtaagtgctttttgcaaatttctcacgacctgctcgaccggtctagttatcgttgttactttttgccccacattagcttgcgtaactgtcgcgcttttttgttcaactacgcttaccatacacgttctatctgtaagctcactaaaatctatgatttcagctgcttgtttttgtcctgctagcgaagctttcgtaccgatcaagatttttgaactaactgataaaatttccgctgactgttttagcgacgatactgaaagctcgtctgccatcgctgcaacttcaggtgatgttttaatttcttgtttacccagctgccctgctttagaaactaacgggctctcaatgatctttgtaggttgaaccgactcaacttccagatcagtctgctgagcagcttcctgcttgatctttgtgtccgaactcacaaccagatttattgtcgagttagattcttgaatagcctggctttcaccagctgacttagaagttaccatactaacaaagtttgctatctgttccttcaaggtcgcttgctgggttgcagacatttcatccaagtcaattacgctttgtgccggattttcgccaaattgctcggtttgttgtggtgcaacgtcattgtctgcaataatttcggctatcggtcctgccttggcttgctttaagtctagtggaggagcagcatccttaggtaatttttcattttttccggcgttatcattttcttggagcggttcgactgcttctgattggtcatgctcgatctctagtaaaatattttgctttttcaaatgatcgctactgctaactaattccttgagtccttccagcaaatcaggcgatatttggacttttccttgcttgaccaagtcatccaaagaaactgtaccgtttactaactgttggaacgttttcgagtcaatttgcaagacttgctctagctctttttttgtttgcgaatcagtagttttaatatgtttgttaagcatgtctttagaagtctctagtcgatttttagcctttttttgtctgaaacctttatcatcattaaccgcaatttccggcttatcttgtgctaaaaaagcctgaaatttccccgtttgttttttggttggcttggctttagcaacctgcaaaccagcaattttcttacctgtaactaccttttgcatttcattgtcctcctttcaaacccttgctttaacgtcaaggtcaagcgatatttacattttgttgtggccggtgaaaatcatccaactgcttttgttcctcatgggctagctccttttgatattgtgcaagctgctttgttttaagccgctctaatattttccgttgtttctgtgcttcgatcaattcactgcgaatttgctctttttgtgcttgcaaccccaacagttgatcgtgacaaatcatgatctggtcgttaagagcttgaatatagcgtcgtgtgacttgcattctgctaactgaaaattgtggagtttccatcatgctgtctttttcttgcatgacttgatccaattcagtatttttctcgttttccaggcggttgacttcagcaaaatgccccttgacctggtcttcaacttgcaaacgatattccagcactttttgtaatgaaaaattaaattcttccatccctgatctccctacccttctgcagtgatccgaccgtcacctaaaacattattcgaagcaaacaactgctgcaatctctcctctgtatctgtgaaacttgaaaattcatccacggcttgttgcaaaaagtcatcgatcggtttgtgcagctgcacagcatagtcgatcacaggatttgttccgctcttatatgccccgatatctatcaaatctttcgcatcagcgtatgttttcaaattttcacgcaattcactggcatggatattatgttcttgagagaccaacgatttcatcaaacgactgacactaggttgaacatcaactgccggataatgattttgggccgcaatttctcgcgataaaataatgtgcccgtctaagatcccgcgaactgcatcagcaatcggttcgttcatgtcgtcaccttcgaccaagaccgtataaaatgctgtgatcgaacccttgtcagacattccgcttctttccatcaacttgggtaattcggcaaaaaccgaaggagtataaccccgggtagttggcggttccccagttgatagaccaatttcacgttgagccatcgcaaaacgtgtgaccgaatccatcatcaaaacaacttttttgccctgatcacgaaaatactcagcaattgccgtggccgtatatgcacctttcagccgaactaagggcggcatatcagaagtagcacacactacgatcgacttagcataaccttcacccaagtctttttcgataaattctctcacctcacggccacgttcaccgatcaaaccgatcacgatcacatcggcctgacaatacttagcgatcatccccagcaaagtacttttaccgaccccactgccggcaaagatcccgactcgctgtccctcgccaaccgttaataatccatcgattgctcgaataccagtcggcatgattttttcaatgtcttgccgtttaaatggatctggggcttcctgcatcgctggatacccgaccatttcagactggtcaagcttggaacctttcaatggacgtcctaggccatcgaaagtatgtcccagcatttttggcccaaccttgacttcaagtgtcttgccagttgcagccactaggcaacccggcgcgatcccctctagctcatctaatggcatcaataagaccgtttgtttaacgaatccaacaacctccgtcactgtcttttttcccgcttttttcgcatagacctcacagacttcaccgacgaaggcttgcaaaccttcgactttgatcacaagaccaacaacttcgctgactttgccgtataccgaataaaaaggatattttttcgcttggtttaaataatttttaaaggggatctttatctttgtcatttatttacctcataattgttccagaaaaccttgtaattcctttttaatgtcaatatcaactaccgattcgtttgattcgacacgcagctgcaaagcatttaaactatcatcatcaaaaattatgtaacgcagatcaggaatttcttctttgacctgctctaacttagtggtcagtgattcatgataagcggagttagcccagaccatcaatacttcatttggtttttcgagttcgaataataatggactcaaaattgcagtgatcttttctggcgttagttccaactgcgtcttcaaaataatttcggccaactgtactgcaaaagaagtgatctcatcctgtttttctgccaggtactgttttgactctgccagactttgctccacgttatcttgtgcctgcttgactagaggtgccattttttgttgtccttttgtcacagcctcctggtatccatctttttttccctgagcataaccagaatcataggcttcttgcttgatttctgctgccttttgttttgcatctactaacatctcagctttcagctgttttagcttttgctggtaagctgccgtctgatgtgctaatttagcgtcaagagctgttaactgtggatcttgcttttttatttgaggaacaaaatctgctgtctttataccaactttcttaccatgcaggggcattgcctgctgtttcaaaatattattagacaatgctgtcttgacctcctcgaccaatatagatctcgcctctttcgtctaacttccgaataactgcgacaactttttgttgtgcttcttcgacagctgataatctagttggacccataaattcaagatcttctttgatattttcaaccgcacgttgtgacatattaccgaagataaagtctttgatacgatcatcgctgcctttcaaggccagctctaatacatcgtttgtcacatcacgtaatactttttgcacatccaacgcttgcaaagtagtaatatcttcgaaagtaaataggttggcctgaacttcactggccaattctggctgtctgctttccagaccggccaagatcgtcttttcagtactgcggcccgttgaattcaagatatcgaccaatgcgccgacaccaccgatactctcacgttcaccatcaaccacattggaaaacttatcttccataactttttcgatccgctgaatcgtttctggtgaagtggccgaaatcgttgccactcgttcagctacatcagattgcaattcatctggaaattctgacaaaacactggcagccttctcagcctgcatataacacaatatcaaagcaatagtttgtggatgttcttctactagcaaattaactaattgctgctcattagcacgacgggcaatgttaaacggttgttcccgcaactggatcgtgttcaaaacatccagaacttctttggctcgttgcggccctaacgaattaactaaaagatcctttgcgtagtcgatcccaccatccaaaacatattgtctggctgtggcagtgtcgacaaattcatcgatgacagcattcttttcttctggagtcacataatctgtattagctatttcataactgactttttgaatcatactgtcaggtaaaagtttcattacctgggaggacgcttctgaccctaaagagatcattaagatcgccgctttttttactccactcaattgagccatctcttatttcccctcctagtgatgatctttcatccaagctttcagcaattcagctgtaactgctggattagtctgggcataatctttagcctgtttatccttagcttgtctttctttgacttctggtttttcctgcagaggtactgctttttcctcttgttttgcttccggtaacggctcactattcgctgaagaagtaggtccaggttgtggtgaatcatcagttacatcgacatcataatcatcatcgtagtagtcatcatcgtcatcttggcgtttcttgcgaatgatcaaaaaggctgcgataccagcgattgcgatgacaccgatcggaagggcgatgtaccaccacggcacattattcttcaccgtcttagtcttatgaacttttggtgtcgtgtctggaacatctaaagcttgaacagtaactttatcaccacgatccttatcgtaaccgatggctgaacgcacaatacttttgatctgcgcctgctggtccccactaacatctccacgaatagcaacagaggtcgttaatctcttcacagttcccggtgcgctaacttgcttagtcacatcagtatctaattcattattgatcgtccggctatatgaagcgccattatcggtattatcgccagttacgttagagacattatcatcggtttgaccagtctgtgcttgttggatctgttcttggttcccattagcttgaacattttcactccgtaaatttggattgctatatttcgtagtcttgcgttccagtgcgtcaaaattaaggtcagcgttaactgcgacgctgattttgtttccatcagctaatgggcccaaaacacgtgtgatcttcttttcaagttgtttttcaaactgtttttggatctgcatatatttactgttcgcacctgtcagatcatcattgtcattattcccatcagccaatacatttccattactatcaacaactttaacgttttcggctgttaatcccttaacggcacctgtggtcaactcaacgatccctttaactgctgaatttgagatcgtgttgccattcaacgtcaatgcaaccgatgctttggctttttttcctttggcatcatcactaaagacatcatcatcaggcatcgttaacattactttagcttttttgacagcatttaaagaaccgatcgaacgttccagctcaccagtcgttgcccgctgatacatgatcttacggtcttcatcagtggtcatcatgctggtatcatcaaataactcatagccttgtgaactatcgggcagtttgttatcgacggccatatcgatccgatactggtcgacttttgtcttatcagctaagatcgttttaccatcatcttttaacttgtacttgatgtcttgatcttccaaatctttcgtaaccgtcccagcgtctgcgtcacttaaattcgaaaacaaaacggcatactcaactctggtgttcagataatatacgatcccaccagcagcaagtatgctgatcaaaccagctatgatagcaatttttactaaacgatttagattagaccatttgtcttttaagtttccaaaaaagtcctttactttatccacttccaagcccccactacacgactaaaactgcatgttcttaagatcgttataagcttccaaagctttattacgaacttgaactgcagtctgtaaagttaattgactttcagtcatattgatcatgacctgccctaagtcatcttgttttccactgatcatatcggtagtcgactgatccataactttcatgcttgaatttaaaccggataaagcatgatccaaataatcaccgaatgttttaccggcgcctttaactgtctgatcagaattatcgagtccagtaactttgcgcagttgagtagcataattatttaagccgttaataccattgacctgtgccattttatctctcctaattttctgatatttctagtgccttactcaagatctgcttattgacctgactcgaagcaacatttgcttcgtaagatctttgcgattggatcaagtcgatcatctcatccgccaagttaacattcggtaaatgaacataaccattttggtcggcatcggggtcatctggtttataactcaacttctcagtttgatcctgtgcaatgccagtcactcttacaccggaactctgtcgtttgttggcttccatgatatttccattgtctgcttcgacttgacgtaaattttcagcgaattgaactgacttccggcggtacgggccaccttccggcgttcgtgttgtattgacgtttgcaatattagttgatgtcgtatcaagctttaaccgctctaaggctaagccgctggcattgatctgcaatccattaaaaatactcactctgatctcctcttctccaatttagtcttaccattaatgattcaaaacataactcatcatttggtaacgccctttgagttgtgatgtcaacgcgctataattcaaaccattttgtgcctgatttaacatctcaacatctaaatcaacgttattgccattttctttaacagccgtatcattgcgcacgctttcatgcggttcaattgccccgcctgcttgcatatgcattttagatgtagtttttaggtgtgtttcttggtccaaagcattattcaaaacactttcaaactcgattcgtttagctttgaaacccggcgtattgacattagcaatattatttgcgttcaattgtgctctattagaagaaacgtttaaagcttctttcattaagccatatgtattttccaaaattaattacacctattttctttgatttaacactaatattttcaaactttttatatttcaattttcatagtagttgcttgcagccaagatgtcccctttatcaaactttttctatatttttcacagcattataattttagctgttaacatactcacaatcaagttaatttttaagttattttcaattacctgaataattcatatctttaacagtttttctttctttgcctgttatcatcttgtttgtccgtgatccaaaccaacaccttttaggtgtttaattgcgtatacaaaaagagcataatatgtctttttttaattattgggactggtaaaaaaaaccgttttttggtatgcttgcactgagctagataataatgattataaataactaactttaaatttttatttggaggttctgaacatggcaattacacccacagatgcacaagacgtttttaaagatgctggcgagaacatcattttcgtcacccagaaattgaatcggcaagatgccgaggcggacaaagcggctgttaccgaattagcagcgcgcattccagcgatcatcaatagcatgaatatccgttacccagatgcccacttacgcgtggctttcgggattggctcggatgcttgggattacttattccctaacgcaccaaaaccaaaggaattggaacccttcaaggcaattccaagccctaaacatgatgccgtcgcaaccggaggtgatcttttcttccatattcgggccaaagaaatggcggtttgttatgaagtattagatcaaatgatgcaattcatttctgataacgcaacaacgattgatgaaacacacggattccgttacttcgaaggccgcgcgatcatcggcttcattgacggtacggaaaatcccgctatcgatgaaactgctaaatacgcattagtcggcgatgaagatccagaattcatcaacggttcatacgcttttgcgcagaaatatatccatgccatggacagctggaaccatacttcaactgaagaacaagaaaaaacaattggccgcaaaaagttttctgacttagaacttgctgacgccgaaaagccaaccaacgcgcacaacgttgtctcacaagataacgaaggcggtgtggaacataagattgttcgcatgaacgttccatacgcaaaccctggcgaaaaaatgaccggtacttactttatcggctattctcgaacatggtcagtgacaaaacgcatgttaaccaatatgttcgtcggcaaaccagccggcaattatgaccacctactcgacttcagtgaaccaacaactggtgccctattcttcatcccatcaaaaacaacactagcaaaaatagcagaagaagaactatagagtgctgactcaaacgagttagacttttaggattaacgtaaaaacgggcattatggcgggtctcagccatgatgtccgttttgtagttaaccggaaaaggctgtttgagaagcacgtttgatataaagtgcgtttaaagcggtttgcctctgagcattagaatcgtaccgtgaatgagcgccaaagacgatcgtttacaggtacgtggctaagcgcaagaggcagctttaaaaagcacgtttgatacagagtgctgactcaaacaggttagcctttgaggattaacagcattattttctgagcatccaattaaccaaattgggtgcttttcttttactttttaagcctgttaattgacttaacaaccatttgattggtacactacacttactaataataagaaaatgaggctattcatatgtcagaaacaatgcacgctgttgccatccaacaatatggtgacgaaaaccaacttgaaatgattactttaccaatgcctacaattggtgaacaccaagtcctaattcaatctaaagcgacagcaatcaacccactcgactggaaattacgtgaaggtcatctcacaagcatgttccaatgggaattcccaatcgttcttggctgggacctttccggggtcgttgttgccgttggatcagccgtaacagaatggcacgttggtgatgaagttttcgcacgacctgccacttcaaatcgtggtacttatgctgaatacgttgccgttgatgacaacttaatcgcaccaaaaccagccaatgtcacttttgaagaagcggctgccgtcccattagctggcgaaactgcttggcaagcactctttaaccacggtcacctacaaccaggcgaaaccgtcctggtccaagctggttcaggtggcgtagggtcatatgccatccaattcgcaaaagcaatgggcgcccacgttatcaccacaactagtgcgaagaacttcgatcttgtccgtgaacttggcgctgatgaaatcattgactatcgaactgaaaaagtggccgataaagcccacaatgtcgatctcgttatcgacactatcgggggtcaaggacaagtcgatgcatgggctgtcctcaatcctgaaacaggtcgccaaatttcaatcgttggtgaagcgcctgaaactgcggccatcattaaagataccaatatgactttcaaagccatctggttaatgccagatggtgatcaacttaaaaagattgccgcattaatggccgatggtaaagtcaaatcaattatcgatactgtcttcccattttctgctgatggcttgatcaaagcccatcaactaagtgctacgaatcactcaaccgggaaagttgttattaaattctagatctcccaaaaaacaccgctaacctaataggctagcggtgtttttttaatcattgaataattgatcactttctttgtcggtacgattcccaatcgtataaatttcgaccattacgaaaattaattcgatgggtggaaagaaataaatagcgactaatagaatcacttgaatcacccagaaataaggtctagtaatcgtgctatagatcggcatggctttaattttttgataccgctcaggggcgacttcacgattggcgttcgccaatgcatcactcaagaagaagtaggccaataaccaaatcagatgaaccacgtagtaaaaatattccggaccgcgttcattgatgaaccgccccgtccaagccgttgcaacgggtaaaaatgacatggataataaccaaatattattcagccaataaatacgctttgttcctcgtttcgtcagcgaaaacatatagtaatgattataccaagcaacccctacgaaaacgtacgtaatgatatacgcaaaaaagtagggaccattttccaaaagtgccttaatttccggtgtttctggcgttttaaattccaagatcataatggtgacaataatcgcgatgacagcatcgctaaatgcttctaatcgacccttattcattctatacatccccttaacaaaaatagttaattttatattttacactatttaattatgatgtgctattatttatagaatacctgatgtaccagtgcattcaacaactaatccccaacaatcctttcaaagatacttaaaaataaattgatttcagccattaattaatagtataatttatctacgtagtaagggaggaattatcatggaaagagagtatcaatcacgcgcttcacttaaaaaagaagttaagtcattatttgctggtcattggggaaaggccgttacgttgaacatcatccccactctgctatcaattattggggtgattattgtcggagcagtcttgatggccatgattgccatcttcgcaaacaccgacccatcaatggctgccaatgaatctttttcgggccattcgtctggtagtagttttgctggtcaaattccaagtttcattttggggctcattacacttgggattaattttactttcttagattggctccgttcgaaagatgctgattttagttcactcaaaggagctttcagtgtcttctcaaaacgttatttcttgggcgcttttctaattcgaattttagctagcttatttacattcctttgggcattgttattcattattccggggatcattaaaggctacgcttattctcaagcttcttatatcttcaaggacttaacagataacgatccacaagctgacgttagctttttagattgtatcactaagagtcgtgagttaatgaatgggcataaattccggtttttcgtcttacaactaagcttcttaggttgggatattttagctggcctctcacttggcattggctatttctggttaacgccatataagaatgcaacttatatggcattctacaaagatcttgcaggcgatcaatttttacagacaacttctgcagatgaaccaactgaagaagttactgttgaagcaatttaaatgaactcaagacgttcttaattgggcgtcttttttgtattatgcggtgattagcagtaggcttagactaaccattttattcagaaaggatgacgtcatcatgaccactaatcaccaaatccaacttgataccgaacataattggcacgcagtgtctggtgaaatccctacgcctaaacctgaagagctactgatcaaagtcagggcaagtagcgtcaaccctgtcgaccttaaaagacgagctagcaccacaaccattttaggctatgacgggtatggtaccgtgcaagcggtcggcgccactgtgaccaactttcaacctggcgatgttgtcttctatgccggcagtacccagatcgatggcagtttccaacactatcaatgtgttccggccgcgatttgtgcgcttgcgcctagtacaatcagtgccgcggagattgccggcttaccgcttgtttcgttaaccgcctatgaattactttttgaaaagcttggttttaccgctgaacaaaatgccaatcgtggcaaacaactattgattatcaatggtgccggtggggttggatcaattctcagtcaactcgccaagtgggccggattcaccgtcactgccacaagcagtctcactcatttcgactggctaaaaacaaacggagttgatcacccgctggattatcattcacctagcagcttagacaacttagccagtcttccggataacacctttgatgccatcgcggtcctttatgatattgaaagctatctccaagaggtcgcacggctgattaaaccgtttggacaagtcggtacgattgttggcaatacgcatccacttgatctcgcaccgcttaagcctaaatcagcctcattttcatttgagtacatgttcactaaaacggactatcaattccaaaccactagtcaaggggcgattctccaacaaattgcgcggctaatcgatgcgcggattctgcatccaatcaccaccgcccactacacaggcttaacggtcgctaatctccaaatgattactgataaactgttaactggccatactactggtaaacagggattggtctactaaacgcaaaaaagccgcaaccaaattggttgcggcttttttaacacaacagtcatcgagttgcggggattgaacccacatcaatcattcattttacgcttcgcttttaatagccaatcgcttttgattttcttgggaggaatttcaatttagatgattggttctaccgttaaactataactcattgggtgttgctaagacacttctttagggaggaattgtctcataaaattaacttgctcagattcacttacttgggagatgcttatctgatatttatagaataccaagcagttgggaccaaattgtgaactttcaagtatgaaatgatgtccgttaaaaaaagccccaccactttggtgagggctcaattttatagctcatcttccgtcgccaacaaaccatacttcactttaaagcgactgatgattcggtaccacgactgataaaagaagaaaataaaaaaaacatttgataaagcatgggccaagtcaaaatagaaactcgcgacataggctgcaataaaagtcttaatcgtcagtggattgacgtatgcgacaaaataccacagattcataatccacccaaaaataaagccccagacaaacccaaaaatacagagcaagtatttattctgtgcccactgatggcgactaattaagcctgccgtaacgcccatcatgccccagcaaaacatttgccatggggtccatggcccttgtcccaaaaacatattcgagacaatcgcggcggtcgaaccgacaataaaacccgattctggaccaaggactaatgccgacacgataatcacaaaactagttggctgaacactgggcaatggtgcaaatggtacccgagtgactgccgcaatcgccgctaaaaccgcgatgaaaataatttcacgggcgcgaatatcccgggtttcaaaccgccaataaaatggcagcatactggcaatcaaacagataaaactgaagatcagaaaatgctgtccttttaaagtgacgataaacaacatgaaaatcgccataatcaagaaagccaatccaaacgtggtccaactattttttaaagctttcatgcgtgcacctcttcccaattcagggcttcgggcaattgactgcgtaacattcggttgatggttgtcgtatagaagaagttatgcgcgaaaaaggcataaggttcttcctccgatacaatcgtcccatcgaataataaggcacactgactagcaaaccgggcactaaaggccatatcgtgacttgccataatcaatgttaagccttccgcttgtaaacgcgttaacaattcacccaacgcccgtttgcgaatcggatcaaggccctttgttggctcatccaacaagagtaactgcggctgcgctagcaatacaatcccgagtgcaatcaattgttgctcgccgccactggcatcttgcgggttacgttcagcaagggtttgaagaccgagctttgctagcatctcttctgccacttgttctggtgttgcgcgttttaactgccgcgcccgttcgataaattcttgacggacactatcataactgaaatgatcgctcggtgtttgtgagagataacccactgttttgaaaagttcagcttgcgcccacttaccgatcttcttcccctgtaacttgattgcaccatggcgcggttgtaataaaccaatcaaaagcttcaacaacgtcgatttaccagtcccatttttaccaacaatcgctaaccaatcgccggtatgaacctctagattgagctggtctaaaacataagggtcatttttttcatactgaaaactcacatgtttggcctgcagaattgttgcttggtcgttcgtggctatttcacgtttagtatgtgttaactgccattgtcgccgctcaatcaattgcttgccactgacaacggtcaatggtaatgccgcaatatcagctggtgcaatcaactcattttgtaaaaagacgtgtggcacatctgggacgaattcacgcaatgccggttgcgcccaaattgctgctaatccaccagcaaccggtccttgatacgttatctcaccgccatccatcaaccaaagttgattagagagcggtaaaatatcatccaactggtgttcactgataatcacggtgatgccgagttcgtcatgtacccgttgcaataaactaataaattctttggtcgcaatgggatcgagttgcgctgttggttcatccaacagtaaaagatccggctgtaaaatcaaaaccgacgctaggttgaccagttgtttttggccacccgataaatcatgcacggaagcatacagcaaatcttggaaacctaaaaagctgactaattcggcaattcgtttttgaatattcgcactcttttcaccaatattctcgagtgaaaaagcgagttcctgaatgaccgtatccatcactaattggttatccggattttgaaagaccatcccaatcttctgcgcacttaacccttgcgataaatcagctaacggttggccctcgaaaataatctcacccgaccgtttaccaacgggccagagttcttttttgagttggcgcaataaggtggtcttcccgctacccgagttcccagctaacgtaatgaagtcacccgtctgaacggttaaattgatgtctttcagattttgttgggttgccaatgcatactgaaaattaaattgttttatttgcgcaatgtccaccataaatattcccatccttctagtaatagcggcaaactatcaattaataagactaacaccaaacatagccaaccaatttgattcaaatgaatcgagccaagtattggataaatcgctaagcggccaatcccctgtttagcaaaataaaaacaaagtgcactgcctgctacaagacttgccaatacccaaccatcccgttgggtaaatcgataacgttgataactcgttcgcttctgtgacccataaccacgggccgtcattgaatcagccgtttgtagtgcgtcaaccaatgaattaatcaataatacttccatcaaacgcatcccggcatgtgatcgggctctaacactccccgtttccatctgcacaccacgtgttctttggacattcttgatattggtaaaccgccgaataaatagtgggacaaaccgcatggtaatcatcgttaataaagttagttgcggtgaaagccgcacaaataaatataagaacttatgattcgtcatactctgattataggaaacaaacactagcattaagatcgccagcgaaagcgccattaaaaaaccatacgtgacagcctctgctgtgatcaccgtcccaccaaacgtcgcaatcacgtgcgccccatgattattcataatagggttcatcacgacgataaagagcatcatgaacaatgcaccctgcaatgtccccagtgttttcttctggtttttcgcaagcaagttcactgcaatcatcatcaacaattcacttacaagaaaaatcggatgaataaaaaccattgagaacgcaattgcaatcacgtaatacgcaaagatgacgattggatttaattgatcaaagaccagttgcgattttaaccctgaggcgcgttgcgatcgttcccgagattttccgtatacatccaatcaatcacatctccactcttaacaggataattaccacaagaatagttaggaaaactgccattcactcgataaagccatccgcttaacggtcctttatcaaattcgaatagcccattaatgcctttgatatagacgccgccgcccgtcccacgataggatagtgccatcccgcgactttgcaaatcacgttttaaaacatcaatcaccatatccccatccttgatttcaacttgatcaccgttcaaccatttcggattaccttcactaattggtccataaacattgacgctcaccttttcaaggactggttggggcgtcgtagtgggcggtgtaactggtttactttcagttgattgtgacgattgattaatggcggattgggtcgatgccgattggactgccgagccttgttctacagcttgttgcgatgctaattgtttgctagaggccgatttttgtgatgattcatttgtctgttcagattgactgctggacttgcgcgtttcagctgttttccgactttcagataccgccctactatgtgactcagaggccttagatttaactttaccatctaaaccaacagttgctggcttgacccgtttttttgatctatgttcctctttaacatgttgactacgcgtagacggattatcttgagccacactttgataggtaccgtatccgatgccgcttaaaataactaaactaccgataatcgcaatgattctctttttagacatatctaactcctaacgatgttcaacttgacgcttgaaccaaatgccaataatcccagtcaaaagtatcaagccggctacagaagcaactactgttgagttaacacccgtttgtggtaattgcttttgctttatttgagcatgatcttgattgtctgcttggtgtttattttctttttcaaccgtagtcacttgtcgttcaaacttgaaactgattgtattattcgctgcattaatcgtgatggatttggttggcgtgtcttttaattgataaccctcaactgcaacatcagatgcattaatcaacattgtgcgtccaactctttgatgctgcaattgaattgttttaaacactttgccgttttgatcgactgcttgcaccgtaacgtcagcaaactgcgctgcaggaattgtcccaatcatttgtttccgatactggaacgtcacggtcgttcccgttttagcaacttgaacagtttgttgtgcattgcctaataattcataaccctcaactgcgacttgattagcattcaccgtaatggtttgaccaacgggttgttcagctaattgaagactctttaaaatttgtcccttttcatcaactgcttggacctttaccgatgctttttcaataactggcgttttaaaatcataaattgagccttttcccgcttggaacaaccggtattgggctaacgtataaacggcttgttcagttgacatcgctagcgatcccatatcgttattaatattccagcggaactgtccatctgctctttgataagcgaccagccgtgaaatcgggttagcgccttgatcgccaacaaatgttgtgactggatcaactccagctgcaattaagcccatgacaaccattgccgtactatttgagttttcttctgtcatataaacactagggattaaaaaaccacccgtttgtgcaacaaatgttttttctttcaacatcgttaccgctttatctagcgcatcttgaacgcctgggaagtcacgatgcatccccaacgccgtcatcgtcatcccggtcgtatctaaatcacttttactaccgaaaaaagcccagccattttcagcgttttgtgcttgtaaaaccgttggaattaaactatcaatcgcttgctgtgccttggcaccataatcacgcatgctaagggcgatgatgccgtaaacttgcccgttgatcccaccagttggtgctttttcaataattttatcaattatatttaaaccagcgaagttggttgcatcttcaccaagtgctgttaccccaattaccaacacttctaaatcggttgccgaaaaacgttgatcagcgagcattgattgtgcatccgcaaccaaggcattatgataactcaagcgttgcgctgcactcagtgtcacgcctgattgaatagctgctaacgctgaccatgcatctggttggccattattcaacaactgttgcgccccagccaccattgctttttgataatccgtactagatgcagtacgtggtgtcacttgtgtaacctttgtctcactcgcagacaccgtttgtgcactaccaataactgaaacaacaggcattattaacattaatcctgtccataataaggtaaaaaattgttgtcgcttcttcatttaactctcctcattccgattaactttgataccctataatttaccatatttaggagctagaaagttggccctataaggttaatcttcacaaatacgccttaaaaaaaacttcatttcaaacacaatttattcatatttcccgcctaaactaatatttattcagttttaaggaggaaatacttatgaattttatcaagcgtgcttggcaaaacgtcatctttaaaaaagggcgtagcttcttattaataattgtgatgaccgtcatcatgatttttatcatggctggtctattgattagaaatgcagccattacaaccgtcaacaataccaaacaacaggtgggcgctagcgtcaccctttctgcaaatcgcgatcaagcgtttaagaaaatgcgcgcctcggctagcagtgatgccccaagtactacagcaacgcgccctaaattaaccatgccctccgtcaaattaaaagacgtaacggctatttcgaaattatccgggctggcaaattataacgtcagcgtcacgacttctgcgaacgcctcgtccattgaagccattacgacatcaagtagttcaaataatagtggtggcatgatgggcggcggctctggcggcaacgctgagtcatccacttcaacaggtgacttacaaatcaccggagtgctcaataccgcaaccctcagcgactttaaagataatacaagtaaaatcacgaaaggtcgcgctttaaatagtagcgacaaaaacactaataatgtcgtcatcgaatccgaattggctaaagaaaacagcctcaaagtcggcgacaccattaaagtcaaagccagcacgacaggcaaaaaagcctatacgctaaaagtagtcgggatctataaggctagtcaaagtagcgctggcatgggtccacaacaaacagaccccgcaaacgtcatctatacggcatacacattagctaaccaaattaaaggtcaaactggcaaagtggatagtgccacattcacgcttagtgacccaactaagaaaaatagttttgtaaaagcagcgaagaagattatcaatacgaagaaattcacggtaacagctgatgacagtacttaccaatcactcaaacaatccatgcagaaaatggccagttttgctaataagattgtttggttagtcgctatcgctggcactgttatcctcgcattaattattatcttaatggttcgcgaacggcgttatgaaatgggcgttttactctcattaggtgaaaagcgcgtcaaaatcgtgggccaattattagttgaaatgttcatgctgctgattgtcagtttagctttagccggcattggcggacgattcgctggtcaagcgcttagcaaacaagttatgcgttccgtcacaaccgaaacgacaactagctcacaaacaaataacatgcaacctggcggtaacggcggccctggtggcgctcaagcccctagtggtcaaactgatggcaatcggccaagtggtcaaatgccacaacctggccaatctgttaaaaaagccgtcaaagcaagcgaccttgatctgaagattagtgccgtgaccttaatgcaacttggcgcattcggcttcaccatcatcgcatttgccgtcttacttgcatcactcaatattttacgactcgagccacgcaaaattctcattggataattataggaggtccactatgttaacagctaaaaacgtcagttactggtacgatactgaagaaaatacactttacaaagatgttaatctcgattttgaagccggcaaactctacggcatcatcggtagcagtggtgctggaaaaacgaccttactcaccatgctttcagggttagataaaccgcgccgcgggagtattttatacgaaggtaccgatatccaaaaaatcggcttaacccaataccgcaatcgctatgtgtccatcgtgttccaagcctacaacttactcccctacatgtcggcactcgacaacgtcttgactgcgatggccattactcattcgacgcatgaaagtgccgccgatttcgcactcgaaatgctcagcaaggttggcatcaatcccgaactcgcccataagaacgtacaaaaactatcaggtggccagcaacaacgcgttgcgatcgtgcgcgctatgtgctgttcagcccccatcgttgttgccgacgaaccaaccggtaacttagatgaacaaaatacgcaggagatcattcatctcttccaagaattagcccatcaacaacaaaaatgtgtgattcttgtcacccatgaaaaagaagtcgcagcaagttgtgatgttcagtatcatcttcaaaataaaacctttcaaccagttgcttaaccaagtaaaaaacgactgagcctgttttacggcttggtcgttttttaacgggcatgctatactgagggcaatcaaaaggagggcttctaaatgctaacaatcttctatggttcttttagccatgctggccaatcatttattattgcagcaacccccaaaggtatctgttttgttggttcacccgatggcactatcagtgaattaaccacttttcttccccaaacgaaattagttgcaaatcaagccgcaatcgctccttatagtgaatcattaacagcttatctcgatggtgaccaaaccacgtggtcactgccaattgatattatcggcggcacaccttttcaaagaagtgtttggaccgccctgcaagctgtgccatatggtcaaaccacaacttacagcgctttggcggctcaagtcgggcaccccaccgcaattcgcgcagtggcttctgccattggtcgcaatccactattgatgattattccttgccatcgcgtctaccgtgaagacgggcaaattggggggtatcgtggcggacttgaattgaaacaaaccctccaccagcttgaaactcaaaccaaataaggggattaatttgaaattttgccaataaaagtctatacttattattaagtcggtggtagaatgtacggttactctactcctttcaaattaagaaaaagagatgattattacgcaagtaactgatgtttatgggttaacccacgaaaactgcaagctgatcgaaactgaaaatgattttactcgcatcttcctagctgaaggtcctgatggtacacgttatacgtgtttactacctgatgcgaaacccaatccaaagtcaaaccaacactttgaatatggtaatccagcagatgcaccatactagatactaaaaaagcgccaacggatattagaatccgttgacgcttttttgttgaaacgtgttctcgccagcatatttctgcacttaaccaaatttaccaaatcagcgattacatcgccaatttggtaaatccagtcaatgctcagcactctattctgccattaatatatccaagaattgttcgccgtatttttctagtttattttcgccgacccctttgacatctagcatttcagtcaaggaagttggcatgatttcacacattgaatatagggtcttatccgagaaaatcacaaacggaggcacaccttgttcttccgctaaatcgcggcgtaactcacgtagttgttcaaataattcattatcttcaggcaacgttttttgcactttgaccgccatcttgcgcgtcactttcgcttggccttttaagactgcaactcccgccgccgtgatttgcagcactgggtattgaccgccagaagcttgcaaatatcctgaagcgactaagtaatcgatcaaaccactgatttctttttgcgaatcaccacgcattagaccatacgttgggagttcatcaaagcggaattgcatgattttttgattcttcgagcccgtcaatacttgcgccaccaacactttgccaaaccgttcatccatccgtttaacgcacgataagactttttgtacatcaatcgtgatgtcttgttcttcacgcgtatccagacagttactgcaccggccgcacgcttcacaatcatcatcaaaataattgacgatgtactgttgcaaacattgctgcgtattggcgtactgcgtcatttcttgcaacttggcatattcttgttgcttatgcgcttcgtccatttccgactgatcgataaagaaatgctgaatctgcacatcattcactttaaataatagaatcgcttcactcggcaagccatcacgcccggcccggccagcttcttgatagtaagcctctaaactcccaggaatctgggcatgcacgacaaagcgcacattacttttatcaatgcccatgccaaacgcattagtcgcgaccattatcggtttgcgatcatagagaaaatcctcttgattctgacgacgcaccgcttcgtttaatccgccatgatacattgtcacatctaacttagccttttcaatcagcttcgtgagccgttcaacttctttccgtgtgctggcgtaaataatcccggatttttgtttgttgacctttaaataatcgattaagtagcgatcactattttgatttttaactacttgaaacgcaagattctgccgtgaaaaccccgtcttaacttcgtgctgaatgttcaaccgttgcatgatgtcagctgccacttgtgaggttgccgtagcggttaaagccacaatcgttggtcgttggcgcatactctgaatcgtatccgtcaggcgtagataacttggccgaaaatcgtggccccattgcgaaatacaatgcgcttcatcgaccgcaatcaaatcaatcgttaattcagctaaatcagctaaaaagtaatccgaatccaagcgttccggcgaaacatatagtaatttcacttcaccacgcgcagcttggttaaagcgttcttggacttccccctgcgttagcgtactattgataaacgtggctggaatcccattttcattaagcgcatcgacttgatccttcatcaaagaaatcaacggtgataccaccaacgttaaaccgggtagcatcaatgctggtatttgataacacaatgacttcccgccaccagttggcataatcgccaagacattagtgcctgccaacaatgattcgatcacatctgcttgaccttctctaaagtgatcataaccaaatttttcttttagtaccgcttgtgcttgcatgccatttctcccacccgttaaaattcctaccttctatcataacaaagattcgttaattccggttaattgaatctcagtttcaagcattccttcaatcaattcttactggctgacaaaaccagcgatttagtgtttaattagaagcatcaaagactgtcaggaggcttcctatgaccttggaaattaatgcaacattaacggctacccaaacgatcgtcgatttaatcgaacaacccgttactcagcttttaattgaacaaacaccggctaatacaaccgcattcgcacaccccgctttattcctcggttttgcgcaacaacaactgcaacaaattgaacaactctccccacttgaaacagcctcgactgatcaagttgacacgggtatctggattaccatggatcctgagtggactgaacaaattggctacgtagggcagctattagccgagcaaaatcaaccaccgataacgagcgcctcgcttccgtccaacgtctctcaaaatttccgaacaaccttagctccagccgttgaagccatcatcttggtcctcagccgctttggttatcccctgaccaaaagcgcaccagtcaaagcaaaaccggctaaaacacgtcatcgatggacaaaagccatcagccaaatcgaattcactgttgccacgcgcgaagcacaaggaacagccatctggcaaaagcgcaacgagatgttattgaaagcgggggcacaattgcggccaaccgcgccacttaataaggatggctcgtttggctttgctgctaaaatgggcactcacttgcgcaacgaacatgcagcgcaagttcaagacaatcaaacgactgaagacattattttcaagagcgtgaatgaaatcggcctcttcttgtactttggtggcaccaatagttggctcgaactatgcgacacaaatggtcgctcaattgacgactggactaaaatctaaaatagaaaagagattcaacatgcaaattatcagttctggcattcatcacggctacttcgacgacctctacggcggtcatggcactcaatttaacgcggaaggtgtgccaacttattccattccgtttaacattcaagacgcacctagcgatacagtcagttatgctgccgttttctacgatctagatgcctacgaagtgacgcaagggtttccttggattcactggacacttgccaatttaaaaacgaccactgtcgcggctaatgctagccaacaagcgcccgatttcatccaaggtgttaatacttggcacagtcccaaaacagaccatttatcaacagaagcaagtgcttgctacggcgggatgacaccccctaaccgcgatcacacttatacacttaaagtatttgcacttgataccacgctcgatttacagcctggcttttacctaaatcaaatgacagcggcaatgcgcggtcacatcttagatagcgctattttagaagcacaataccgccaatttaaacattaggtgacaatggccttaactcggctaacacttttgtcatctgatcttaaaatcgtcgcttttttacgcttaacatcgtatgataactttatcaattcggaataaggagttctcattcaatgaaaaaaaacaattagcattattgcgataatcgccctcatcatcgtcggatttgctggctaccgttaatacaaaaatacgtatgtcggcgaagtaggctacgccaaagttgctgctcaatctccagctaaagaagccaccaaagatgattcaggtaaaacagtgactaatatgtatagctatcactaccaactaaatgtggtgaaagaagatggtagccaccaagtggtccctgtcgaagttactggcgaaaatccaacgccactcactcccaacagctatgtcaaagttgaatttaattcaaaacgcgtcttaaaagggcctaatactgtgtccaagaatcaaattccggctaaagttctggcgggtttagataaataataaattagcttatcctagtaccattaatacttgttattagctgttaccctcttaaattaagttattaaaaagcagtacccttgattagttatcatgggtgctgctttttgtatgtttcctgtgaaacattttgttttgtttgattttctttaaggcttcacgttgggcgaagattgttagttcgtgttcttcaacaaacgtcatcacccactcaggattttccttactatagttacgtaaagcccagccaattgctttttggataaagaactcatctgtgtcaatatctgccagaatggcttcttccaaaaacgccacattcgttttttcgtaaaaactgagttgtagcgtaatcgcaatccggcgcagccagaaattctcagcacctataaaatgctgtgcaacccaatcaaactgttcaggatgcagtctgatgtactctccaaatacttttcgccaagcatcgatgctgtcccaccaaactttttccaacaccaacgttaataaatgttccatatcagccggttcccaccaacgtactgaacgcaatgccatctcgatggcaacatattgatactcacgcgttggttgagcatataaagtctcaatgaactgcattatttctgctggtgacaattgtttcacagactgccacaattcgcgttcaattaaatggcggtccggtgctttaacaccgttaaattcaaattgactctgcatgtatttcttcattgccgcctgattttctggatatatcggtaattcaaaatccatggttatccctccactatatcgcctctaaaaaacttgtgccgtttgtttagctgtttcaatagcttcctgcataatcacgttagctttttctggcgaataatcaattccttcgatactaattttaatgacttcgtcaacaccggcaaagccaagaattgttttaacgtattgtgttgcaaaatcttggccagcataaacgcttccggctgactgaatatgaactgcttttttcccagttactaagggctgcggagctgtttcagtatgtctaaatgtttttccagccaccatcactgtgtcaatccacgctttaagtttcgtcggtacatttaaattccaaagcggattagcaatcacaaacttatcggttgctaagaactggtcggtatagcgattaaaccgagcgaccttctcttgctgactagcgcttaaggtggccatagcttgcccttttttaacgccgcccatgccgtcattagttcttgatcaatttctggtaagtcagattggtacaagtccaaccaactgatttcatcagctggattttgtttttgataaacttgcatgaactgcgccaaaatcgttaacgtccgtgactattctgtagcaagtggatgcgccttaacaactaatactttactcattaatttccgccccttagtatttaaactttatacactatcgttttagtatactatctgcggcgttgtccataagctttacatcatttaataaaccaaccacctattaatgaccttttacaacgttttatacagcaacaaacaaccaaaaacgattaataagtcataaatataccgcaccatcgttcgactatcaattcgagtgctcacccaattgcccaacggaatcacaactaacaataatggtaagctaagtcccaatagttgcaatacttggatggtccaaaagcccgctaaaatatgactgattacaacgattgtcccaacacaaataaaatgggcctgtagaatgccccttaacgatgctactggccatttttttaatgtcccataaatcaccactggcacaccatgactattgtaggcactgcccatcacgcctgatattatcccagctaaataatcccaatgatgtgactgtaaatgttgctgctgcacgtgatgtcggtgtaactgatagcgattatagctgtcataaaggattaaaaacccagctaacgttctcaacacaatcgtcgttggcacatacgtcatcagcgctatcccgactggcacacccaataatgaaccaatcactagtcgcctgacaaccgctatatcaatctgttggcggtggcgaatcactgccggaatcgccacaattagtcccagcgcgccaatcaaagccgttgccgcttttttaaatcaatcgctactagggccaataatggcatcgttactaatgcctcaccaaacccaaaaaccgttctggtaaaagcgcccaacgcaacgatcaaaagaatcataattatcgtcatccaaaaatccttcctaaaccgttttgttccacacaaccttttcaaactgcgtgccattactttttagtacggataaacttgcattagcaaccattttttgtgatcgaatttcctcaaacggaatccctagtagtgtgttgataacaaacaataaaataatcccatgcgcaacaactaatacatcaccatcaggatacgccgtttgagcagtcttaatcgcgagcatcccacgttctaagaccgcctggtaggactccgcgtgaatctgtttggcatcaaacagctctggatgatggaagtaattttcatattgtggatggttcgtcaaactagcaccaggttggccttcccaatcaccaagtgccatttcttttaaatcatccacgaccatgattgccggttgtgattgattagtctgcgacactatcgcatccattgtttcaaccgcacgtgttaatggtgacgtcagtaacgcatcaaaagactggtccgctaataaactacctagtcgtttagcagccgcttgccccgcctcagttaatgttaaattcgtcccaccaccattgaaacactgtgctcgattaaccatcgtttcaccatgccgtacaaaataaaaagttgtcatgttgatcccgcctttataggatctatcatactataaaatgcaaaaaaagacgcagttcaaattgaactgcgccttcattgagcctcgttttatttaccttccggcgtgttttctgccacgacttgctcataggcctttgtaccagcatagacttcgtcagttaggatgttgcgtttatacttcatgacacgataaatgtggagaattaagactgccacattaatgaccagtgctaaaccactgattgtcatcaaagcagcactactgtgcgtaccttgcactgaaaattgtgaatccgttacaaaagcgggataactcattgtaaacatcatccaaaaagccaatgtttgcgcacgtgcttggagccagctcccttttttaaccaggaatgctgctaatgtacatgaaattaataatgcagcgcccgcatagaatgagtgatcaccaacacaattgtaaacataggcgaagttccaaacatcataggcgataatccaaggccagatttgatcgggccagatcatgtctttttgtttgtcatgactgataataatgccgaaccagcctgagattgtgatgatgttaataattccggcaatcccgttcatgatattccacgcgccaccattcatgatcacaccgtcgactaagccatgtaggtgtgaaacttgaaaatcacgaatcacagcttccataatattaaacgctaaaattgcgggtgggaaaatcaatgcccacttgttatgttgtaacttagggataaagcgcagcgccataaaccctaaacaacctgctaatgctgagtacactttaacccagtggaaccaagtcccggtactactagccgtcgttggccaaacaaagagcgttaaaacgactggcaacccaacaaagagaattaatccaatccacttgttagcccgagctgcttcatttaaaaccattaatgcaataaccactagtccccaaactagccaatccattcctgaaatattttgaaataaaaacatatcagtcacctccaaagaaataattgctaattacattcttactttaactgcaagctggcggtttctgtatggtcaattcaggataaatgtccaaatctaatgattattttgtaaaacatggttcacagtaccatttaacatgcgatgcatgcgctgataaaattcctctttagattcttgtagatttgttacaagccattgcgtaatctgtgtcgccaatgcccaaccataaaaattggcaatttcatctcggaaagtcgctggacaatccacctttaaatcttgaacaacccctgcaaccatgctaaaagcgactcgatacaaaaagcgacttagcaaatctcgattaagtgaatgaaacgtatttaaacagaaatgccgattattttcaatataagttaccaagacatctagaccgacgccccaatcccgttcacgttgatacactgccagttgcgtaacaatttcacgattataaatccaagcaaccaactcattaatatcggcgaaatggtaataaaacgtattgcgcgcaacgtcagcactgcttgtcaattgattgaccgtaatgtgatcgaccggagttgttttcatcaattcttttaaggtatctgctagcttttgcttggtatccatcgtattgccctccaaaaattatctatgattagcatcccatagatagttccgaactgcaatcactaacccgatttgcactccaggataaattgttctatcgttagagagtacaattaacggaggcgacttataatatgcacgaaactgacgacgcttttagggcgatgaccaacggggaatggtactttgattcagcggtcactattcaaaaacgggatgcaacccgcattgccttacaaaaagccggccaaatcttagataacgatgcacggatggccactatccaaaaattactcggtcataccggtagcgactttttcatcgaaaccggttttgaatttagcttcggtgaaaacattacgattggcgatcatttttacgccaatcgtaacgtcgttatttgtgacgaagcaccagtcaccattggtgactactgtaaatttggcccaggagtatcactcttaaccccctaccacccaattgaccccttagaacgtgcgacaaaaaaagaaatttctagtcccattactatcggcaatcacgtctggctcggtgcaaatgtcacaattctgccaggaatcacgctcggcaataacgttgtcgttggtgccggcagtgtcgtgaccaaatcctatccggataacgtaattttagttggtaatccagcacgggtattacggaaaattcccgctatcaaaaaggactgacaaatgtcagtccttttttaggcttcaattgcataatattcaataatcgtttgtaaagcctccgctgcgcgttgatctccaattaacttagtgtagtatgctgtaaatcgttcatctgctacatacatggctgctaaaccgcggtgcattgctagactataccggggagtcgctgtttgtaaccacgtttgatgggcttcaaaggctgtttgcgccgcttctgatggcaattgcggctggtccaagtaagtttgtaatgccgtcttcaatcggtcttcagccgcctgcatcgttgcatattgggcctcacttagccctaaaaagtgcagattggcttcttgcttggcttgtttcccatagttagtcgtcacttcttgcccgtagcgttgctcattttcagccactgcctgttgtttaaactgtttgaatttagtttgatctgtcatttgaattcctccggtttgattttgaagggtcgcatctagctgtgctaacgttgccgttagcgcagcttgttgtttaaccagttgttcccgctgatttgctaagcgttccagacgctcggccggtggtaacgccaacagctgctgaatctcagccagactaaactgtagttgacggtacattaagattaactgcagtcgatctgcatcctggctcgaatacgttcgataaccattactagcaaccgttggccccagtaaaccgcgctcgtgataataacgtagcgtacgctcagaaaccccggtcaattcagcgaaagttttaatctgataatccatttgccttccctccttcaaaacccactataaggcctgacgtgacgtgaaggtcaagcattgttcgttagtgcctgattaatttctgtttaaccaagtaatcatgggccacatcgcgtgctttgcggtgtttgacctgtacttggtagttcatctcttgcatttggctctcagtaatctgacctgccaagcgattcaatgctttgacgacttccggatgcgccttggcaaagccggctttcataatcggtgccccttgataaggcgggaagaagtgacgatcatcttctaaaacaactagtttgtaccgtgcgacttccgcatcggttgtataaccatcgaccacatcgaccttgccgtccgcaatcgctttatagcgaatacttggctccataattttagcatttaaatttaattgataggtgtcctttaacccttgatacccatctttttggtgataaaaatcaggatcaaaaccggccgtaaatggttgattcaaaacggctaaatccgaaattgttttgacattatatttcttggcaaaggccgcagtaaccgccaagtcataaccgttttgatagcgcattggcggtaagtacgccatattgaactgttcttgtagcgatgtttttgcaagttgatacgttttagttggattctggtttgtcttagttggcgacttcaccaacgtctgtaaaaccgttcctgtgaattcaggataaatatcaatcttatcagccttcaaggcgttaaataagaatgtggtcccaccgaaattaggtttaaccgttactttgtagttaggctggtcttctaaaattagatcacgatacatattcatcaagatttcgggttcactacccaatttcccagcaatcgtgatggtggtctgcggcgcttgaaaccgtgtcattccttcgatcacaccgaaaaggccaacaaaaatggctaaactgactgtgatttttttaaaggataatgtccctaaccagcgaattaatgcactgaccactaacgctaaaaccgctgaaagtgtcgccccaaccaataatagtgcgttattatttgactgaatcccaacaagaataaacgtcccgaggccgcccgcaccaatcaaggccgccaaggtagctgtcccgataatcatcacgagtgcaatccgcaaacccgagataatcaacggcatcgcaagtggcagttcaatccgtagtagccgtttagcgcgcggcaacccgaaggctatttctgcctcttttaatgctggatcaattccgatcaaaccagtgtatgtattttgaaaaatcggcattaaggcataaagtactaacgtaatcacagccggaatcgtcccaattccgacaagcgggatcaataatcctaagagcgccaaagacggaattgtctgtaagacacttgtgacttgcagcattgcttcagctaatttctgatgagctgttaaaacaatcgccaacggaatcccgatagccgccgcaattaataacgccaataacgaaatctccaaatgttgcccaagtgcttgtagcaactcaccggattgggtcgttaaaatttgttcaatctgttgcatcatcgttatagcccccgtttcgcaatgagcgttgttaaatcggtcatcgtcaattgccgttgttcttgaccatcagtggcaactacgcccccatctggatggtctactaattgttgcgctaattcagctaatgttgcactggacgtaatcgttgtcggctgattattaacaacagttcctaaatcggccgccaataaatcttgaactgtcaacgttgcttgttggcgttcaatgtcaaaaaattcgcggacaaattcattttttggttgattaaaaatcgcttttgctgtcccgacttgctgaatactgccttggcgcattaccgcaatttcatcgcccaagcgcaacgcttctttcatatcgtgggtcacaaatacaattgtattatgcagctgcttttgtaaactcaaaacgagatcttgtaattgtgtacgggtcaccggatcaagcgcactaaagggttcatccatcaaaatcaccttaggactagttgctaacgcacgaataatcccaatccgctgctgctgtccccctgataattcgcttggataacggctagcatactgatccggatctaaatggaccatttccaaaagttcgcgtgcccgtttttgacgatcagctttggtccatttcaatacctctaattgaatggtaatattttcctcaattgtgagatgtggaaacaacgcaatgttttgtagaacgtaaccaatattgagccgtaacgtttggagatccatttgattgatgggttggccgtcaatcttaattgtgccactcgttggttcaattaaccgattaatcattttaaccgttgttgtctttccgctaccactcggtccgaccaaaacaaatagaccattgtctggaatggttaacgtcaagccatctaatgctaagctttgttcatattgcttagtgacaccttcaaattcaatcatgtgctactcctttttccggttaacgatttgttaacttattgtaccacttagcaatcagcccaccaattgacgtgcttaaacacccaatccaatttttttgattcgctttgtgactatgctaagatgaacccgaattgaaatctgaggaggtcttaatatgcaaacacattttgatacaatcattattggtggcggtcctggcggcttagcggcggcttacagtctcgctgaacaacagtccgtcttagtcgttgaaaatgatttatggggcggcacttgccccaaccgtggctgtgatcctaaaaaaatgctttattcagctgtcgaagcactcgacaatcaacaagcactccaaataaatggcttagtcggaactagcgctattaactggtctgaactgatggcctttaagcgatcttatacgcaacaaatcccgactggtaccctcaacggtctacaacatgccggcatccaaaccgtcacgggcaccgcccacttcagtgatactcaaaccttgcagattaatggtggcacttacactgccaaccatttcatcattgcgaccggtcaaacaccaacgctccctacaatcgagggtcacgatttactacaaaccagtaatgaatttttagacctcgatcgtttaccagaaaaggttgcctttattggtggcgggtatatcgccattgaactggcaaatattgcagttactgctggtgcagaagtccatattattcaacataacgagcgtattttacgcgacttccctgaagttttaacacataaactcgtcaccagtcttcaggaaaaaggcattcactttcattttgacactgacgtcacaacaattacgcaaaccagcaatcagctaactctcagtaatcaagctaattttaaactgacagtcgacgccgcttttgccgcaatgggccgcaaacccaatatcgaccaactggcattggaaaaagctggggtaacagcgaaccagcatggcattcaagtcaatgaccatttaatgagtagtaatccccgcgtcttcgccattggtgacgtcgtagatcgtgtccaacccaaattaacaccagttgctggttttgaaggccgctatgtcgccaaccaactactcgctaaaaagacaacacccattacttacccactcattccacatacggtatatgcaagcccacaaatatcacaagtaggcgtttctgttgcaactgcacaagctgctcctagtcaataccgcattaatcaacaaaccgtcacaaattggtataccttcaatcgtattcaagaatccgaagcaatggtcatcaccatttttgacaatcaaactaaccaactcgtcggtgctgcggcttacaccacaattgctgaagaactcattaattactttaccaacctgattaaacatcagacaaccgcaacggaactcaccgataccatctataactacccaagcccggcgagtgatttaaaatattattattaaaaaaagtgttgagggccaacttactcacgaccttcaacactttttttaattttcttttttcgccttcatctgtaaccagatattaaacgcgagcacaatcaccaataggactgtcgcaatcagcatgatgttatgcaagccttggtacataatcgcgcgcatcgctggtaataagtgcgctggtaattcgtgaacgcgttggagattgcttaacttattcatcatcgccatcgtaatttgaccgtgcgattcggcaatgccgcgtgttaaggcatggtttaaaatcacaccgtaaatcgatgacatgaatgtttgactgagaattcgcaagagataggcaaacgacgtcgcaatgggaacatcacgttcttcggcatcttcttgaacactgatttgtaggacgttaaaactcatcccgagcccgaaaccttcaaaggcccccatcaacagtaagaaccaaaacgatgcttggtcgcccatcatcaacataccgctaaacgcaattaaaaacgcaactgttcccaatgtcacaacgcggtgtttacccaatttaggctgaattgcaggacccgccaatgagccaattaagttggtcaccgcacctggaatctgcgtcattccaccgagtagcgcacttaatccaagtagcccttgtgcccacattggaatatagatattaaacgcgataaatgcgccccataaaacaacaaataaaataaagtcggtcaccaattgcggatttttaaataagcggttcggtacaatcggatcaactgcccggtcttcaactctaaacaagacaactaataaagctaaaccagcaaataccaatcctaaaacgagtgctagcgaacccgtcccaatcatttgaatccccgtcaataaagtcaccaaactggtaatcataatcccagcacctaaataatcgacgtttccggtttgatgtgatttaagcgtttctttaaagaaataacgaacacaaacaattgatactagggcaattggtacattgatataaaagacccaatgccaactaaacgtatcgacaatccagccaccaattaggggacctacaattgaagccgcactataactcgcagtcgcataaccaatcacctgcgcgcgtttgcgtaaatttttgtataagtcggcatagataatgaatggtaaagtattcatcccgccagcaccgatgcccatcaccgttcgtgcaatcagaaagaagacgatattccccgaaaccgcctgaaaaatcgaaccaaccgcaaataataatgtcgccagctagtaagccccacgatttccaatccgttcgcctaatttactccataagggggtcgcaaccgccatccccaaaaggaaaaccgccacaatccagcccatatattgaatcccgtgtaaatcactgataatagcgggcaaagccgtgttgataattgtcccatcgagtcccgccattgtgttggataataataatgctaatgttaccaaaagtacataagttaaaactatattgaatgaacggtggagggttgcagatgccagataataaaagaatattaacaattagtgagtggtatctggagtgtcagaacatcacgactcaattgaataaaatgagcgaaaaacatggcttaagttatgatcaatttctcgtgttggaacagattgtggaactaggacggaacaccccaggccaaattgcagtcgtatttgggacctccgcaccagcggcttcccgtaaaatcaatacgctacaaagtaaaaagtttattcgcaaaattcgtgatatggaaaatgaccaacggaatgtttggttagaagcaactgaagaaggcctccgcaagtacaaagcgctaaaaaaagatattactaagcatactggcatcaaagcaacggacttggagtacttacggcagataaatcaaacaattatagaataaaaaagggaaagcccatcatctttagatgatgggcttttttaataccaataaggtaaatcgtaatcattttatgcataaattggtataattgtgaaagaatataaaaagttgaacttaaggggtggagaaatggcaacattaatggacgtcgctaagcgggcaaacgtttctaagatgacagtttcgcgggtgattaatcatccggaacaagtaacagatgaattgaaggaattggtgtatgccgcaatgaaggaattggattaccgtcccaatttaattgccaaagccctagtcagcaacagtacccgaatcatcaaattgtgtatcttggaagacatcgacgttaccgaaccatattacatgaatctaatggtcggaattgctaaggcacttgacctacatcagtattcgctgcagttagtaacttggcgtaactttgatatcgggaattgtgatggctacattattacgggattgcgtgaaagtgatgttgcatggattcgcgatctgacaaagccagtcgtcgtttttggggagaatcagtacggttttgattatgtggatacaaataaccagttggggacctaccttgcagcgcaattagcattagagcgtggttatcgccagcttatttatattggaatggcgagtgaagaagcgtttgaaaaatcacgtgaagccggttatttacaattaatgcatgagcagcagcgtcctgttcagttacaccattttaacaaccatagtcatttgaccgaagcctacatcattgaacactgggcgcaattcaaactcgagactgcgtttatttgtgccacggatcgtctggcaattgggattgaacgggggattgcgtcgtgtggtggtcatgtgccgcaagagtttgggattacaggatttgatggggtctttttaaatcaagttgcctctcctaagttgacaacgattaagcagtccatcattgaaatgggccgtgcatgcggagagaatatcctcaagaaaattaatcaggagtggattgagcgaccattgatattcgaaccacacattgaaatgggcgggacaattcgccctgtgctaaaagaacaatcggaataagcataagaaaactgttaccggtaacatcaggaaaacatttgcaaaagcgctttcaaagtacgacaataaaacttgtaaacagcactgataaaaatttattggaggtcgttatagtgaaaaagatgtggaaaaagctagggttagtttcgttattggctggtgtaacgttaacattggctgcttgtgggagcaagagtgcggatggcggcaatttgaaaatcacaattctacaaggaaaagtggaatccaacaagcaattcaaagcgattgcgaagaagtatgaaaaagcacatccaaacgtcaagattgaaatcacatcaatcggtggtgggacacagtataatcccgttttgaagacgagaatttcatccgggaatgcacctactatttttagtttagatgggccagcatcggttaaacaattcaagaactacacggctgatttaacggatacaaaagctgctaaggccgctattccaagcacactagatactgttaagtcacaagggaaagtttacggcttgccatttaacattgaaggctatggttttgtttataataaagcggtcttcgaaaaagccggtatcgatccaaagagcttaacgacttacgataaattagaagcagctgttaaaacattaaatgaacaaaaagaacaattaggcattaaaggggtctttgctttacctggtaaggaatcatggattctttcagatcatttgttgaatgtttatctaagtaaagaatttgatggcaattcacaaaagttgtatacctcaaagaaaatgaagtttgagaacaatgcagaaatgaaacaaatgattgatttgcaaaaagaatattccgttcaaccagtcatgcaaatggattacgcgggacaagtgaaccaaaactttgctcaaggaaaagttgcgatgattcaacaaggcgactggatttacgaaaccgttaaccaaattgatgcgaaattcgctcaagacgggatcggcatgattccaatgccagttaaggaacaacaaggtaagatgcctgttgggacctcaatctactgggcagttaataaacggaagagtaccgacgaacaaaaagcagctaaggacttcttgaactggctatatacgtctaaagaaggtaaaaaagacgttgttgagaaattacatttcgtacctgcttataaaggttacggtgatgtgaagatgccagatgcactcacacaatcggtctatgattacagtcaaaagaaagcaacattcggctgggttttcccgggttatactggcacatcatgggatccagacgttgcccaacctaacctacaaaaatatctatcaggtgaccaagattggcaaaagactgtttcaaatatgaaggacggttggacaaaacaacaaactaaataaatttattcaattggataaaacaaaaagagggtattgaaatgaaaaataagagtttatcattttggttatttttaacccctacccttgttgcattagcattagtcgttttcattccaatgctggagggcctattctattcattcactgactgggatggactctcttttactaaggtcgttgggtttaaaaactacatggccttattacaagataaagcattcggaaacgccttttggttcacggtagcttttgttatcgtgaccgtcatcttgctaaatgtaattggcttggggttagcattacttgtgacacagaaatttaaaggcaacaattttttacgagcgatcttctttatgccaaacatgattggtgggttaatcttaggatttatctggcaattcattttcacgcaaggctttagcgctttgggatctgccttacacatgactgtcttccaaaactggttaacgaattcactaaccggtttttggggcttggtaattgtgacggtttggcaaatgagtggttacatcatgattatctatattgcttacttgcaaaatattccaagtgaagtgattgaagctgctgaaattgatggtgcatctgcttggcaacgatttacgcggattacattcccaatgatcgcgccagcatttaccgtctgtatgtttttaactctgtcgaatgggtttaaaatctacgatcaaaacttgtcgttgaccaacgggggaccttacaactcgacccaaatgttggcgatggatattgtgaatacagcctataattcgagtgatttcgcactcgctgaagctaaagcaatggtcttcttcttgattgtcgctgcgatttctttagtacaagtcttttataaccgtaaacgggagggcgatttctaatgaataagaaaagaaatagttggatcggcgtcctcggtgtattgattggtcttttatggttattcccattctatatgattctaacgaactcatttaaaacaccaaaaggcatttttgcctcagtattgtcgctgcctaatccattcacgaatgtgaactatggagattcgtttaaagcattgaatttcattagttcattgaccaattcgctcattattacagtctgcagtgtgttgctgattatcctctgttcttcaatggcagcctatgcactgcaacggaataaatcgaagttgagtagcagtttattgctgcttttcatctcagcgatgttgattccattccaatcagttatgattccgttgacggcaaacttcggtaatgtgcatctgttgaatatgtacggcttgatgttcatgtatttaggcttcaactgtagtttatcgattttcctatatcaaggcaccctttcaagtattccgattgcaatggatgaggcggctgaaatggaaggtgccagtcggtggcaaatttattacaagatcatcttaccaatgttgagtccaatgactgtgacggtcgctattttgaacatcattgcgatctggaacgattatcttttaccatcattggtcttaccacaagtgcaatatacgattccactacaaatgtttaatttcttcggagaatacacgaaacaatggcacctcgcattagccggcattaccttgtcgattattccggtcattgtcttctacttattcgctcaaaaatggattatcaaaggtgttacagatggcgccgttaaataattaaggaagtgttgatcgtgaaaaagcacagcgaaacaagacaaacgttattggcagccgggaattggttatggtcgctttttaccatcaaccttgcttggtttggaattaattttcctgtcattctgacactgattttaacgtttagtatgccaaacggccgagtaatgattcccggtgcagttgtgctagtgttaatgctcagtttgtttacactaccaagtttagtcgcggtttttagagcggtggaccaatggcaagttaacggtgatggtaattatgcacgcgttgtgttaaaagggtggcggcaggcactgccagactttttagtgaatctgacgttagcgacggcattgatgatcatcgtgttgttactaaaagccagtgtaggcgatattttagttcgtagcggcttattggtctggtttggggcgttattgctagttgtcgttgccagaagctacttggtcgggttagtgcgccatgatgttaccttaggcggctttatcattgccaatgggggcaaattagtgctagccaccggcgttttcatcttgttgatgggcattaatatctttttaaaactcgcgtttatgattcttgttgcgagcgtttcgttggcagccttcattagctatcaattattgaacggtgcaccagttaaaaacgaagtaagggagaaatgatcgatggtcgaaattaatttaaatcatatcaataaaaaatattcaggaaatgataccaattctgtcacagatttcaatttgaaaattgcagacggtgaattcatcgtatttgttgggccatcaggctgtggtaaatcgacaactttacgaatgattgcaggtttagaagatatctctgatggggaatttaaaatgggcgaccgagtgatgaacaaggttgcacctaaggatcgagatatctcgatggttttccaaaactatgcgctctatccccatatgacagtcttcgataacatggcgtttggccttaatattcgtaagaatgataagcaagataccaaaaaacgggttgatgccgcagcagaaatcttaggtttatcggagtatttagatcggaagccatcttctctttctggtgggcaacggcaacgagtagctttaggacgagcaattgttcgtgatgctaagttgttcttattggatgaaccattatcgaacttggatgccaagttacgggtgcaaatgcggactgaaattgcgcaattacatcaacgcttaggtcgtaatttcatctatgtgacgcatgatcaagttgaagcgatgacgatggctgatcggattgtcatcatgaacgatggtaaaatccagcaagtcggcaagccaactgaactctataatcatccggttaataagtttgtggcaggctttatcggttcaccagcaacgaatttcttcacggtaaccttaactaatgggcatctagtaaatgacgatggtctaaatatcacagtgccagaaggtcagttgaaacagctcattgccggtggctacgatggtcaacaagtgatcttggggattcggccggaagatattcacgctgaagaaattgccctccaaacattcccagatgctaaaataacggcagaggttgtcgtttccgagttattaggggctaacacaatgctctattcaaagattggacaaatcgattttatcgctgaagttaattcgcgggattatcatgaacctggtgatcgggttgagatggcgcttgaaatgtctaaagcgcactacttcgacatcgcaacggaagaaacaatctattaagcgctgctaaataggcggaataattttggctgacgtatcggagggaacgaaatggagagaatttttgaagtcgatccgtggcagattgtcacgcatcaactagatcgtaaacataaacggctacaagagagtatgacgagtatcggtaatggttacatggggatgcgcggcgtattcgaagaggattattcaggagacagcctgcctggcatttatctcggtggtgtctggtatccggataaaaccgtcgttggctggtggaaaaatggttatcctgactattttgggaaagtgatcaatgccatcaatttcatcaaaacgaatcttaaaattgatggtcaagcggtggatttaggcaaagatgaagtgaccgcatttaaattggcactcgacatgcataatggggtgttaacccgccaattcatcgttactaaaaataataaacaagtgcaagttacgatagagcggtttgttagtatcgttcaaaaggaattatgcgcattgcgctacactgttgaaaacttggcgagcgaagcagttgagattgagattagttctatgatcgatgctgatgttcaaaatgaggatgcgaattacggtgagcaattctggcaagtgattgagcagtcagacgctgcggatgacacttatttggtcggaaaaacaatgcccaacgatttcggggtaccacggtttagtgtgggggttcaaattgatcatcaaacgacaatgatggcagatactgggcttcaagaagcccaccaagttgggcaacgttttaaacagcaattggcccctaaaacgcaattgaattttgaaaaacgagcggtagtggtgacttctcgagattattcagagttggacttggtaccaaatatgcaacgtatcaagcaggtcgttgcgcaacaaagttaccagcaattattagcggcacagacgaatcaatgggcgaaacggtggcagatggcggacgtggtgattgtcggtgatgatagtgcccaacaggggattcgctttaatttatttcaacttttttcaaccttttatggtgaagatgagcgtctaaatatcggtcctaaaggattcactggcgaaaaatacggtggtgcaacttactgggacacggaaggttttgcaatgccgctttatctctcattggctgatccgaaagtgtcgttgaatctattgaagtatcggcataatcaattgtcgggtgcagaacacaatgcccggcaacaggggttaaaaggcgcgctctatccaatggtgacctttaatgggattgagaaccataatgaatgggaaattacatttgaagaaatccatcgcaatggcacaatcgcctatgcaatttataactacacacgttacaccggcgatgagacttatttgctcaatgaaggtatcgaagtgttaactgagattgcacgcttttgggcagaccgtgtccatttctcacaacgtgcgcagcggtatatgatccacggtgtgacagggcctaatgaatatgaaaacaatattaacaataactggtatacgaatttattggcgcaatggacgcttagttatacgattgaaacgctcaaaaaagtaagcgataccaaaaaagcggatctgagactttcagatgaagaactctcacaatggcaagcgattattgaaaaaatgtacctgccacaagatgaacaactcgggatctttcttcaacaagatggctttttagataaagatatccagcctgtcagtgcaatcccagcagatcaacggcccatcaaccaacattggtcatgggataagattttgcgttcgccgtacattaaacaagccgatgttctacaaggcatttggtattttatggatcgtttttcagctgctgaaaagaagcgtaattttgatttctatgaaacgttgacggttcatgaatcaagtttatcagcggcggtccatgcgattctagcggctgatctgcattacgaagataaagcggtggaaatgtacgcgcggacggcacgcctggatctcgataattacaataatgataccgatgacggattgcacattacgtcgatgacggggagttggttagcgattgtgcaaggttttgcaggcatgcgaattagcgatgaaggacaattatcattcaaaccatttctacccaaaaaatggacggcttatgaattccatattaacttccgcggccggttgttgaaaattagcgtgacggccgaccgaactgatatcaaactactcaagggcgatcgtttggcaattcaagtcaatgatgcgtcgatgatgttggaataggaggttattatggacggtgtcttattcgatttagatggggttattacggatacagcccgatttcattttgcggcgtggcgtcaattggcgcaacaagcgtttggcgtcagcttaccagatagctttgaagctgagttaaaagggattagtcgggaagcatccttgcaacgaattgtggcctttgcccaacttgatggccagtatacggtggcacaactcgcagcactggcgactcaaaaaaatgaaaattacgtggctgctatcaagcaattaacggctgccgatattttaccgggtattcaaccgttgttagtagcattaaaagcgcgcggggtgccaatggtcattgcttctgctagcaaaaatgcgccactcattcttgatcgattagctttatcagcatattttacagcgattgttaatccgaatgacgtgcaccaaggtaaaccagccccggatatcttcatcgcagctgctcagaagattgctgttaatccgcgaaaatgcgttggattagaagattcagtagctggtgtggccgccattaatgctgcaggcgctgtttcggttgcgattggtcatgcgagcgaattatcagcagcggcggttgttgtccctacaacggcggcgttaacggctgatttgttagaacaagcctttgaacagtatcaacactaattaatcagtgcaaccgagccttcgggtgtgtgttggactggtttttttaaggaggagacaaatggatttagcagcgatttatcatcgaccagatagtgagtttgctttcttatatcagccagataggctacgggtacgattgcggacggcaagtaatgacgttgaagcagtgtacctagtgtatggggatccttatatattagtcgatggcagttggcaaccgaaaacgattcggatgcagcaaggcttaataacggatctcgcttgtttttggacgattgaactgaccattgatcgccgccgattagcctatgcttttcaagtgattggtgtggacgggaccagcactttttatggtgatcaggggcctggtccaatcttacctaaaacagatgcttgttttcggatgccctatttccaagaaattgatcgggctaaggtaccagagtgggtcaaacaaacggtttggtatcaggtttttcctgaacgatttgcaaatggtgatccgacaaatgatccagatggaacattaccgtggacaaatgaggcaccacaggctcaagatttctatggcggtgatttacaaggggttattgaccatttagatcatttggtggcgttagggattaatggattgtatctcaatccaattttcatggcgccttcaaatcataaatatgatacgcgtgattatcggatggttgatccacattttggcaatgacgagacgctacggcagctgattactgcttgtcatcaaagagggattaaggtcatgctagatgctgtcttcaaccatctcggcgatcaatcaccacaatggcaagatgtgattcaaaatggcgcggcttcaaggtatgctgattggttccatattcgggattttccagtgcgttatcagccaggtcggaatttcgaagatgctacagacattacatatgatgtctttgccacgacgccacacatgccaaaattaaatacggctaatccagaggtgcaagcttatttgttatcgatagcgcggtattggattgaagcatttgatattgatgcttggcggttagatgtcgccaatgaagttgatcatcacttttggaaaaagttccgacaggtgtgtgatgctgctaaacctgatttctatattcttggtgaaatttggcattcagcgcagagttggctcagcggtgacgagtttagtgcagtcatgaattacgcctacactgatgcgattttggattattttattcataaaaaaattccgctccaccaaatggtttcgaagctgaatcgacagttaatgctgtaccgggatcaaattaatcaggtgcagtttaatatcctagattcgcacgatacgccgcggttgctaacgatggccaacgacaatcgacgcttgatgcgtcaaacgatggcttttatgtatctacagccgggtgtgccatgcctctattatggagatgagtatggcatgacgggagtggacgatcctgctaatcgtaaatgcatggtgtgggatcccgtggaccaagatcaagccatgtatcagttcgttaagcagctaattgggcttcgccatggtaagcaaaaactattgtcggaaggacagcttgagtggttaattgagccgactcatcccgacgtcttaaaaatgactcggcgattaggtgagcaacaattgacggctgtttttaatgcaggtcaaacagccgttagtgttgcatcaatgaggacaccaattctgtctgaaggggttcagcagcaaacagcagcgaccatcattgaaccagatggctttatgatttattaacatttcccaggcaataaaaaaagattcgcccatatggggcgaatcttttttagttaggctgctcgttttctttggaattttgcaaccagtggtaaaatcacgccgaggcccattaaggcgactgagacgacgatgtttaagattaattcgtgtgtatatttggctgtgccaggtgtggcatcttgtgggaagatactgaagatcgttcctaatgctgtaatggctaaacaccagaagccaacgatgatggcccatggtttgtttttaatgtatgtgtattctgatgggaatttttcactattgaaacggacccgtaagaaggcgacaaagatgaaacaagttacaaatggtgagacgataccgttaatatttaacaaccaattgaagatgtcgttaatctcgggcagaaaggcactagatgctaaaacaaaggtacaaatcccagtggtcaaccagtaaccgttgattggaaggccttgtttattggtcttagtcagtgcttttggtaagaattgtttggcagtgtcggataagaaaatccgtgtgccgccatcgagtagcatcgctaattgagcgcccatgtaaatcgcttgggtaacagcgaagatgtagagtaagactttacccatgtggaattgttgcccaagggctaagaaggcgtagtatgaaccgttcatcttcaagtcagctggtaagtggttggcatcgaagaagacgccgattgctaatgagccgaagatggttaggaaggcggtcattagagcgagggccatcatggcttttggaaaatcttttttaccatctttcatttggccaacgtatggtgcaacaagttcggcaccgttcatggcgaaaattaagaggccgatggttgagaagtaatgtaaatcaaattttggaatgaaggtgtgtgcgtttaatggatgggtggcaacgtgaccaccgttcaataaaccaacaaaggtcattaggacaaagaggatggtcatgacaaacatcgcccccccaccaacgatactgagtacctgtagagacgatgtaaacttgtgttggaagaagatgaagaggatggtaattgcggctgttaaaagcgcaaaggaagcccgtgagagcttgtcttcaagatttccgttcccagtaataatccaaaagaaggaaacgaccattgaattagcaacatcgaccaagtatggcaaactcgctacccagtaacaccaagcggttaagtaaccccaaacatcaccgcttgtatggcgcatccaactggaaagaccgccaccgtctttactgaaagcagatcctaagtgaccaaccattaattcataagggaggacataggcgaatagtaagacaatccatgagaagacaactgccatcccttggttttgaaagttataaataatatcgtcaaatccaatgacggtcacaaaatccattaaagcaaggacttgccaggtaatatatttcttttttggttctatttcatccatcgtaaagaaaccccttttctgaaaattcacaatgtttttattataatcaaatcagaaagggaagacaaaacttttttgactgtttcacattgatttttaaagaacgggggaataatcttacaaaattgttattttagcccgttaaaatgtcatctaaaaagcgcgcatgccgttttaatctcttgtaagatagaattatcataaaatctggaggcattattaatggacacaccaacagtcgttagcgtcaaagacgttaaaaaaacatacggtaaaccaaacgaaaaacaatacacagccttaaaaggcgttacttttgatgtgaaacagggcgaatttgtcgggatcatgggggcttctggttcagggaaaaccaccttattgaacattttatcaacccttgacaaaccgactgctggccaagttgaaattaacgggcaagcaattaatgggttgaaagggaatgaattagctgattttcgtgccaaggaaattgggttcatgttccaagacttcaacttattagaaaacttaacggcctatgaaaatatggcattaccattgacgttacaaaatgttggcggtaaaaaagtccgcgatttagtcacatcaattgccaagacgttatcaatcgatagtttattaaacaaatatccaaccgaattatcaggtggtcaaaaacaacgggtcgccgctgcgcgggctttagtccataatccagctattttattcggagacgaaccaacgggtgcgcttgattcaaagagtgccaaggaattattggatacaatggctcagctgaacgaagaacaacgcgtttcaatcttattggtaacgcatgatccattttcagctagttattgtcaacgaatcttgtttattaaagatggtcaaatcggccaagaactcgttcacggcgataagagtcgggaagccttttatcaagaaattttagatacattaggcacatttaaccattaggaggaagtctaaatatgttattgaagttatcattaaccggcattaaaggccgtttgaaagactatttagtgcttttttccggtctaattatggcaagtgccattttttacatgttcgaagcactggcaactaacaaaagtttcgttacgagtaactcgccaattagcatggcgggcattattttccaaatcgggtctgttttattagggattatcacattagtctacattatttatgcgaataatttcttaatgagcatgcggcgtcgagattacgggatgttcatgatgctcggcgcaaaaggccgcaaaattgcccaactaattgctgctgaaacattagtgattgggacagctgctactctcattggaacggcgctcggggtcggattaacccaaattgttagcagtctgttattgtctcaaatggatattcagattaagcatttctcaccgttttacttacctgcagtgttagtaactttgattttcttcattatcttgttcattattgcagcggtagttaatcaattccaacttttgaaaacaccagttttacaactcttacacgatgatcaacaaccaaatcgcgtttcacaaaataaattaagccgtattgtacaaattgtcttgggcttacttttcttagctgttggttactatatgatgattaaagtcgcaacgttccaaattatgggcttagttgtggcattagtgacaattgtgctcgggacgtacttcttgtttaatgcccttttcggctggttgattacgttgctcaaacgtaacagcaagattcgtaatcgtggtttaaataattttacgttagcgcaattgagcttccgcattaaggattacaccaagatgctcgcattggtggcgatgttatttgcattggcactaggcgcaattacagttgggattggctatcaaagtgaaattccagaaatggcagaaacaatggcgccttacgacgttgttttaaatcaaccgaaccaagaagcattgcgcctcacaaaagatttaaagggtgtgaaggcgactgctaattacgatgttaaagaagatgcgaaaactgtctactatcggacagcacaacttgaaaagtcaccaatcatggccattcagtttggtaatgggaatggtgtcgcccgcgcaaaaggggttaaaccggtgaaactcagtgagattcaaaacggcgattcttcatccttgcgcgcaattcaagtgccaagtcaatctagtaaggacgttaaagtcgtctctgacgctgaatttaatcaagtggcaggcgcaaccacgcaagttaaaacatatcgggtcaaagactttgcggttaatttacccgttatcaaaaaaattcacgcacaacaagtgattgcaaatcctgaattggctaaaggtcaaggggctacaatggatagtagcaagtatgctaactataagctagcgaacagcatgttcagtgggctcgaatttatgggcttcttcctcgggattgcattcttagcgatgttagcaagttgcttgatgttcaagattttatctggggcagctagtgatgttaaacgctacacaatgttggctaaaatcgggacgcgtcgcaatctattgcaacaatccattgccaaagaaattggggtcttattcctcttaccaggtatcgtcggcgtcatccatgtcctctttggtcttcaattgttcaaattgattatgattgatccatataatgatctctggattccattttcaattttcattattctctacgcaatctactacttgctcactacatggctctacaaaggaattgtgttgaaggaagttaaatagtagatggttgaaacagtttaaaacataggaatcagtctaaaaaagccccctttaatctgaacttcgagattaaagggggctctttttagatgaggtcgaagttgtttctctagacgctacttgttacactgatgtcattaagaggcgtataccacgctggattagtttttaacttgcttagctacaattgtggtgagcattttacctacaaaaaaagccaaagaagactgccgaaactgtcatctgaagcgcgtattattattgaacggcatgaattattgcccacaaaaaaagctgaacagtcagaataatattgcccagctctatattcaatgaatattcatacatcaattatcgttttgatactattgaagggttaattgattgtaactttcaacagtaacgccttcgtctgttaaaataactttagtaatactaccgttcattggactaacggtaacatcgaattggtcgttaccaaacttgccaacaatactgcgaatggttgtgccatgactgaccatcaagactttatcaccgtcagaacattcagcacgaagttgtttgaaacctttaccgacgcgggcccaatattcagcggcatcttcagcatcgtggaagggatcagcttctttcatgaaatctttagaggcatcgagtgagtatttggtgatgatttcttggaaggttttggcatcatgactggcacctgccatgtaccacgctttgggtgaatcttcaccttcaaaatagccgtagaattcttcgcggaagtgcggtgtgatagcatatggagtatcaaggtagaaattcttatggagaataattttagcggtgtccattgcgcgactgcggtcactagaataagcttgagcaaaattaactttcgctaattctttgccagcgcgttcggcatctgcaatccctttcggagtaagtggtgagtctgaccaaccttgcatccggttataacggttaaagaatgtttgaccgtgacgcactaaataaagtgtgattcgtttcatatcgtaaccctccaacaatagcttttagtaccttcattctagcatagataaaaatggtgtgcagggtcattccatattttttgcaaaacggttatatacatttataatttttaatggtaataataacaattgatttataatcaattgcaattatcattaagagggaataaattttaaaagatactaataaataactttatcaatatttattaatattttaagcataaatcttttaattttatacattttgtgttatttttgactagtaacacttaataaccacatttagtgtttatgtaaaggagtggttcgatgcaaccagaaacggatagtaaccttgttgatcgattcaacgaatggtatctgcaaattggccaaatttacaataagataaatcatttaactgtcacgcacgacttgacatacgatcaatttttgattctcagagaggtcaaattaaaccccaatattgaagtggcgaaattatcggaatcctttgatctttcaggcccagcaatttcacgtaaaattaatgttttattcagaaaacacttaattgttaaaaatcgcagtgatgaaatggaccaacgtaaagtattcatttcattgaatgagcaaggattacgaatggttgatcaattggaagtcgatttctacttattctttaaacattttaaagatgacggcaatgcagacctttctcaattattcgcacaaacaaaccacttattcgatacactggataaatgggaacctaattcagatattattgattaggtcaaaaaaagccgcgcacaaatttaaatttgtgcgcggctttttttatttaatcgttaaagttgccattttctacgtctttgatgaaagtcttcaagtgatcgaagtaaacgggtgcgttatcaatcatgtgatggtgaccaccatttggcgttgtcactaagcgagcatggggaatcttttcagccatgatcttagcggttgcgattggcatggtttcgtgttcaccaaatgtgattaacgttgggacagtaatcttgtggagttggtcacggaaatgccaatcctttaatttcccagtcacaacgaattcattatcaccttggaagacgccataaacgtcggttgccattgttgggattaaatgtgagattgcaagtggttgtttgcgatcaacgtaaccagcgtttaacttgtcaacaagtgcttggtattcatcgttgtcgtaatcattcttagcttcacagtcttgcatgaatttcaattgttcaggggtcatgatgtcttcacgaattttgttgatgtttgtgacatattcgtcaatttcatcgaccatactcgagatgatggcaccttttaagtgttggccatatttagcagcgtacatttggaccaatgcgccaccccatgattggccgattaagtagaagttgtcgatgcccagtttttgacggacttcttcaacttcatctaagaagtaatcatatgttaataattggtcattgcctggttgtgagtaatcaggttgatcagaataaaatgaaccaagttggtcgtacatgtgtacttgtacaccaagatcagctaattccttaccgaagttttcccagtattcgtgattaccaccagggccaccgtgtaagcagagtaaatgaatgtcgcctgttccttgcgtattagtccataaatggtaaccattatccaatgtgaggattgttgttccttgtttcatatctgcaccatcctttaattatgatagtttcattataaacctattagagagaatgtgcgagggtcaacatgatttagttgagcgtttctaattggcgtcgaatggcaggaacagcctgtttattccccgttagaatgaggtgatcattgagatggatttgcgtgtcaccatgcggcatgatcagttgcttatcgcggtaaattcgactaattgtgacttggtccacaaatgggagattagaaagttgaatcccggtgaagcgccgatttttaaccgtgacttcgaagagcccggcatcggtgttatcaatgatttgtaaggtagatggagtctcgattaaacttcgcaacagactgatatttgcttcgtaagtgttaaaaatttcaacgccatgttctttaagttcatcgtattgatcgtccgagatattcttaaattcaaagcgggcgatgatccgcggtactttggcctgaatcgcttgttgggcaagttgataattttgctcattatttaaatagcctaagaccaggatatctgtatcgaagacggccgcgtcagttaaggtggctggtgccaagtcaggcaagagttcgaggttggcttggctatggtagatttgataattttgttcgttattggtaaataattcgcttgtgtacagacctttggataactgttgggcgattggaattgtcatgatgttggcgccgatgaagttaacacgtttgcgtggcatctcttcaggcgttggtaagtagaatcgattgaacagaatcggaccaagaatacagctaatcaccgctgcaattgtgaaagcgccggattgctgtgtcgtgataaccttcaagttgagaccgaccgtcaaaatgggtaagaccaacgtgatggtcgtcgaactgaggaaagtcccggcgagggcgttggtgactttgaagcgccgttttaagacgaagtaaatcaaaactttggcgcccatgaaactgatgaagaaaaagggaatcagggtcagtgatttaggatcacgtaagagcgcggggatgttgagttttgcaccggtcataatgaagaagatgggaatgaaaaagccgtagccgattgatgttaatttatcttgcgtctcttcacgggggcgtaaaagtttcatgaccatgccggctaagaaagcgcccaaaatactttcggcaccgacttcttcggcaatcgatacaagtgtgatgattaagaaaaaggctaaacgaatatcgagttgagtcgttgacttatcaatccgctcaaagaagtgataaacagttttaaaacgcatcaataagaagatcgcggctaagaaaattagtgatagtaaccacagactcttagaaccaggattattgagggcggcataaattgttaacgaaatcagcgggacgatttccccgaggacggcaattaacagaattgtttggccaagcggctggctgaggagttctttttctttcaacgcggcgatgacgacccctaacgcgatggttgaaaagagaattgttgcgagtccaatatcggtgaacaacccactccatgccaataaactggcgagtcctagcgaacttaataggatcagcgtaaaactaccgactgccagttgtaagggcgtcagcggtgttttaacgccagatttagctgtggtgggttgctttttaaagagttcaaagtcgatttccatcccgcttaagaaaattaagacggtcacacccaatgatgaaagttccgtcagtgtgggggtggttgagatgaggtggaagccactttgtccgagtaaaatcccgaccaaaatttccgcaacggcggttggtaaataagaaatcttaaattttgccatgagtaacggcgtcattaaagccgccaatagaacgattacgagcgctaagcttgtcataaaaaagatcctttcaatgctcaataaagttgtgtagagcatacactaacctactaaagcatgtcaaagccgaatagcttccgagcaacagcacgggttcgtaaaattggctttttatatattggcgctaatattatcgattttgttgataattcgttagtgattaaattattattaaaaagttggcattatcgctagttaatatctacaactaatttacaattggtaataacttctgtaaaatagatgctacgatattaaaaagggggcgatctaaaatgaagataaaagaaagtctcgcggttggaatttttgccttttttggcgggattttacgctatgcaattgggctcggattgcaccaagcagcagggtttccgtatggcactttgtgtgtgaatttaatcggggcgttttgtcttccttttttaatgcgttacatcgtggttcgttatcagatcagcgatacgctggcacttgcaatgggcacgggctttttcggcgccttcacgactttttctagttttagcgtggatgcattgaagttattggtggccaatcaatggtggccatttagcctgtatatcgggattagtttgattggcggtgtctgcttaagtttagtggcagattactgggcagtttggctgctcgatcggcaaggaaagtcgcaggtgctaaaatgatgacgttattaattgtcggattgggcgcggcaatcggcgctattttgcggtatcaattaacccgtcttggaacgcagattgccagcgaatatccattaatcacctttttaattaatttaacggggagcttttgcttaggctgggtgaccggggcacaattggatcaaacgtggacgctctttttgggcgtcggggtcttgggtggctacacgactttctcaacgttcaatagcgaattgagtcagctgtggttccgccgccgttaccatattttctttggttatctgctattaacctacgggttagggctggtggttgcagcggccggcttttttgtgggaagatcgtgaaacgtgctttagcaaataactttttccgcttagctacatcaggaaaacaatcgactacatcgcttatttccctgattaggctaatcctcgaaagttaaaccgtttcaaacgcactctaaacgtgctccgataggcatatttctacgcttaaccaaatttaccgaaccgacgattgcatcgccaattcggtaaatccagttaatgctcaaaatataagcgcctatcgtcgcactcttgtgaatttagtgttaaacttgtagaactgtttatttagaaatcgggggacatctgctttgactgacgaacaaaaatcattagaacaacgccgtttaaccgagattgtcggtttaattaaaaacgccgaaaagcacttcgaaggcgccgttgaacgggctaaatcagaagaaaaagaaattaacgcaaacttctttaatgatgtacggttgaatttcaataatgattcagcaatgactgaaacggcagtctcaatcgaacaacaacggcaaatgttgcaagaacggaataattcttggcaacaatcttcccggcaacttgagactttacaaaaaatggaaaaaaccccttatttcgcgcggattgattttaaagaaaagggtgaaccaaagtctgagtccatttatattgggctagggtcattcaccgatcgcgaagatcatttcttgatttatgactggcgggcacctatttcatcaatttactatgaagggaagactggtgaagttacgtaccaaacgcctgacggcccgcaagacgtcaatatttctttgaaacgccaattcttaattgaaaacggccaaatcaaggcattatttgatacgcaagaaacgattggcgatcaaatgttgctggaagtgttgggcgagaagtctgatacacaaatgaagagtatcgtgacgaccattcaacgggaacaaaatcaaatcatccggaacactgacgcggacttattgttcgtgcaaggggccgctggttctgggaaaacatccgcgattttacaacggattgccttcctactttaccggtatcggggtaacctggattccagtcaagtgatcatgttctcgccgaaccaattgttcaacgattatatcgccgacgtgttgcctgaacttggcgagcaaaacatgattcaaatgacttactatcaatatgttgcacggcgtttgccgaaccttgctgttcagagtttatttgaccaattcgaaacaccaatcacggaaactgatgcgcggattagccgtttgaaagaaagcctagtcttctataaagcagttaaacgttacgcagcgcatcttgaaaaaggtgatatgcgcttccgtgacttgaaagtgaacgggaaggtcttgattagtaaggaaaaaatcagcgacgtctattaccgtttcaacgaaaactatcacttaggaaaccggctagacgcgacgaaggaaagtttattgcgcagtttgagccataaagtcgaccatgaaacgaaggctgactgggtgacagaacgcgctgaaaacttaagtgatgaggaactccgcgaaattatggcgggtaaggactttaagactggtgaagcggaaagtaaatatatcgctaagcaaatcgttttgaaggctttcaaacccgttcaaaaaggaattcaacgcaatcgcttcttgagtattcaagcacaatacgtccacttcatgcgggttgtgccgcaattggttgatttggctgaatttgatctgacaccagaaatctggaatgatcatgtgactgattttgtcgctaatttaaaggccaaacaaatgacgttatcagatgtgacaccttacttgcatctttatgatttaatgaccggtaagcacggcgaacgcgacatgcgctttgtctttatcgatgaaatccaagattacacaccatacgaattggccttcttgaagatgcacttccctaaggcgcgcttcacgttactcggtgatttgaaccaagcgattttcaccaaagaaaacagcacgaacctattacaacaagtgcaacaactctttgatgcgcaaaatacgaaggtcgttcaattgacgcgttcatatcggtcaactgaacaagtcaccgactttaccaaagggctcttaaagggcggtcaaaaaattgaagctttcaaccgtgaaggcgacaagccaaacttgattgtgcgccaaagcgaagatcaattggtcgctgatgtgaatgcgcaactcgctaaaaatgaagcagataagttaacgacggcgattatcaccaagacattggtgcaagcccaagaactaacagctaagttgaaagccagtggtacaaaagtcactttaattcgttccgaaaatcaacgtttggcagcgggtacgttagtcgttccaagtttcttagccaaagggttggaatttgatgcgattatcggctggcaagtcagcgcaaccaactacaatcatgaagatcaacggcaattgctctacacgatctgttcaagagcgatgcatcgcctcactttattagcaacaggtggcatgtcaccattgattaataatgtggatgcggatgattacacgttaattaaatagaaaaaacgcgcgctgaaaggcgggcgttttttgattggatgaaaagtgtaatcgcgagaaaatgggcaatgaatattttaataaagcgcttttaattattaaaatgtttatttataaatttaatggattttaaagcgggctcataattatttagcccgcttttttgcatcttatcgctttcttagcttatagattacttattaattgccaaacaaaatattgtatattgaccgattctattcgttaaagtttatatataaataatgtccattattacattatttatacttacttataattcgatcgtcccccttagactgatgctggaatggcaattatcgatactaaagtatttttatgaggagtgtatgatgcaaagattaaagtatttttacaagcgacatgccttaacagtaaccttattattttttggactattaagtattgcgatggttgcaatcgtctatttacagcccaataaaatcctgtctggttctgactatcaccgcattgagaatttggcactttcgattaaacagggagagtggtttccgagaattagttactttttcatcggcggaatgggctatgcggcaggtcttttttacccagatgcttttctctacttaccagctattctgagagtagtaggactatcaatcaaggaaagttttattgtatttgcaattgcgattaattttagtacgtttttaatcacatatatttcaggaaagttagcggattttaataagaagcaagcattaatattctctttgatgtacggtcttagtatttatcgttttgcagatttagttaatcggcaagccattggtgaggtgagcaccggtattggtatctgttatcaatagggatgcagctattggttatagtcatatgatttctgttgaaatgatgggcattgtcatcattatttataccttattaaatctcaagagattctaccaaaataaaagtttaaagtatctcattgctgctggcttattagcaatcggtttattagggcgttatttcttagcggttggagaacaaatggcaaccacgatttttcaagtaaccgcacaacccctggcatttttatctgaccgcacattaccctttaaagacattgttgttaattcattaacgaatgctgtttttcatgcgaatacagtgaatgtcggtatcacgattctactcggattaggcatcgcgtgtggtctattttactattccaaaaacgaccgtgatttaattgggattgcgttggggctattcatagctacgacgtcgattatgccgtggcatttgttggatcatacaattatcaatacgattcagttcccgtggcgtttttttgccattattacggcaattgtgagttacttagttgctaaggatgaatgtcatttattaaagaataagtactacttttatctgctaattctgttgttgggcgcaggaaatgtcatctactctacgaatagtattcaaaaccaaagttggcgctttagaacgaatactgcctataatacgcccaccccttattacattggggccggacatgagtatttacctgctcaaaccgactaccagaaaattttgcgacataaaaaacaggtcattaagtatcagccgcataaaataaaaattacaaatgtacggcatacatggggccgttatcagtttgatttcaggacactgacggatcaaaaagcagttgttgaagtcccctttatttattacaaagggtacgttgccgaactcaaccatcatcagcgattaccaatgcagatgaataaacgaactgggttaacacaagttgcgttgaagggaactggtagaatcaccgtttattatcgaacaactacgattcagagaatagggacggtgatcagtttgcttagctttgggatgctgattataatcatttataaagaaaaaaggcgagctactaaatagcgcttattcacggtactagactaatcctcgaaatataatcacaagatgacgcactctgttttgaaacgtgctttcatcttgcatattcctgtggttagttacgcaccgcaaacaatcgccttaaggcgcttattcacggtactagactaatcctcgaaatataatcgcaagatgacgcactctgtttttaatgttaaaatggatgcgtttagtattggaggattgtcggatgaagaacgagatgaaatattatgaaatctcgcgtgatgagtggcggttttttcatggccgcggtgacgcgtatactggcatcacggacacggagctggaacagattcggggattgaatgatcggatttcacttgcggatgtgagtgatatttatttgccattacggcatctgatacagatgcactatgaacagtaccagatgcgccaggccgaaaaatctgaatttctagagattaagccacataggacaccatttgtcattggcatcgctgggagcgtcgcggtcggcaagagtacgacggcgcgcttgttgcaactccttctcagccgggcctacccggataagaaggttcaaatgattacgactgatgggttcttatatccgacagccacgctgaaacaaaaagggattcttgataaaaaaggctttcccgaaagttatgatatgccgcatctaattcaatttatgaatgcggtcaaaaataatgttggaccagtcaaagcaccgaaatattcacatcagatttacgacattgtgcccgacgagttcgacgtgattgacgatccagatattttaattgttgaaggaattaacgtactacagttgccatcaactgagcagatttacgtcagtgacttcttcgacttttcaatttatgtcgatgcgcaagccgacttaatcaagaagtggttccttgaacgtttcgatctattactcgatttagccaaagatgatccgaccaactactattatccatacgccatcagtgaccgacagagtgcattcaagatggcgtggcgggtatggcgtgacattaatttacaaaatttaaacgaatatatcttaccaacgcgtaatcgtgccgatgtcattttgcataaaacgaaacatcacgtgattgataaggtattcctacgtaaatattaataatagaatgagttttttcacaggaaggccgtcaatccattgacgttttcattattaatcagtaaaatagatacattatagtttgacttagtgttatgaatctagcaatttggtgttacttgttcacaccaaattactttttaaaaagaggagtgagttgtttggtccaaaaggacatgcaagatttcgataagattatcgtattagattacggtagtcagtataatcaattgattacacgtcgtatccgtgaattcgggattttctctgaattgttgcctaacacgacaacagcagcagaaatcaagaagatcgcccctaagggaattattttctctggtggcccaatgagtgtttacgatgatggtgccttttcagttgaccccgaaatttttgaactagggattccaattctcgggatttgttacgggatgcagttgatcagttttaaaaacggcgggaatgttgaagcatcaacagaacgtgaatatggtaaggctgaaattacagtcactgacaaagacagtgacttattcaaaggtcttcctgaaaaacaaacggtgtggatgagtcatggcgacaaagtcacagcgattccagaaggtttcgtaacggttgctgaaagtgataatacacctttcaccgccatcgaaaaccgtgaacgtcggatttatgggattcaattccataccgaagtgcggaatactgaattcgggaatgatattttgaagaactttgcatttggcgtctgtggggcccaagacaactggacaatgaacgatttcatcgacatgcaaatcgaaaagattcgcgaacaagtcggtgacaagaaagtccttcttggtctttcaggtggcgttgattcatctgttgttggggtgttattacaccgcgcaattggcgaccaattggtcagcatctttgttgatcacggcttactcagaaaaggcgaagttgaacaagtgatggaaagtcttggcggtaaatttgggttgaacatcatccaagtggacgctaaagaccgtttcatgagtaaactcgctggcgtttctgatccagaaaagaaacggaagattattggtaacgaatttatccaagtgttcgacgaagaagcaactaagttaaacggaattgatttcttagcgcaagggactttatacactgacattatcgaaagtggtacaagtactgcgacaaccatcaaatcacatcataacgttggtggtttaccagaagacatgcaatttagcttaattgaacctttaaatacattatttaaagatgaagtccgtgaccttggtgaaaaactaggcatgccatatgaactcgtatggcgccaaccattcccaggccctggccttgggattcgggtcctcggtgaagtcactgaagacaaattaaagattgtccgtgatagtgatttaattctccgtgaagaatttgcactcgctggcttagataaaactgtatggcaatactttacagttttaccaggcattcgtagtgtgggtgtcatgggtgatggccggacatacgattacacagttgggattcgtgccgttaactcaatcgacggcatgacagctgacttctcacggattccatgggatatcttgcaaaaggtttctgtgcgaatcgttaacgaagtcgatcacgtcaaccgcatcgtgtacgatattacgagcaagccaccttcaacagtggagtgggagtagttgtaggagagccagaaatccttgtttatcaagggtttctggctcttcttatttttttactgcacttttattgcacttttttcatttctttgtttcgcaagtagtctacagtaaattgattctttggtgaagtatcataattttgttttgcttctttaaaggaaatggctccatttaatttgttagctacctcaaaattactgttaggataaagatgtccatacgttcctaaagtcgtctcaatatcttcatgtcctaaacggtctttaatgatgagtgggttttctcccatactgattaacaaggaagcatgcgaatgccgtaaaccatgaattctgattcgatgaatactagccagcttagcatagcgttcaatagcatgtgctagcgtatgtttttgggtaggaataccgttatagctcattacaaagtctgtctgaattagattttgttgtgctttcttccattcggatagataatttagagtacattcatctaatacaatatgacgaacactcgcctttgtttttggttcaacaaatctataatccgattgattcttgtaataaagtgttttgttgatggttagtactccagagtcaaaatcaatatcttcccattgaatggcagtagcttcaccaattcgcattccagtcataaataaaaaccacagagagataaataaaaagtgttgatagtaatcttctttataaattagagagattactttttcaaattcttcttttgtccaaaattcaattttagacttttgctttttcacattgccaataatcttagatggatttgtggtggttatcccaaggacaattgctcgatccatagcaactgaaaatagtccttgaacagctctcacataagaagacttacatttctttgataattttagttgtctacatcagatattagttaatcacttattaagttaaaactcataagcaacacaatctatcttatcatgtataaacccgaatgtcaacaactttttttaagtaatattcattcaacgttttgctacatgctcatctctcgacgacatagaatatcttaccatcctagtgggacaacgtcaatcactaatttgaaaaaaattcaaaaaaattgaattcctgtataaatatcgaaaaaataattcatatcacccggattctcatccctaatctgcgctattgattatccctcataatacttttaaactgctatttgttccaattttatccaaattggtataggtaaacaaaaagatcctgcaaaattcgcagaatcttcacgtcctaatagaagtcttctaggttttcatagtctaatatcgcaatctttcgaccgtttcgttcaattagcgcatgactttctaactgttttaacttacgcgataaggtttcaggcgttgttccaatatatgttgccagttcttttaacttcatcggaatcatcacttcagtttctccgctcgctttagctaaatcaagtagataagtcacgattctggattcaactgactcgatattgattaagttcgcctgtttttccaaacgcgtcatcttatcagtagttgcttctagtaactttaaactaatttcgggataggctaacagtaactgttgaaaagcactccgcgataacgtacagattgtactatcttgcaagacctcaccgtacaacggctcatcttccgttttaaaaagtaacttttctccttcaaaatcaccgggttccatcatgcgtagcagttgctctttgcctgctgtagagagttgatagaccttaatgctccccttagctaagatcactaaccgcttctgatccatcgggctcatcaccaacgtcccttttttaacgcgttcatgatgggtaactgccgaaatcttgaccaaactatcacggtctaaatgattaaaaatcggtactatctcagcacaaatatgttgttcgtcagtcacctagcccacttccctctatcttaatcgtcgtcttcttcatccaatccttcgcgcgctgcttttcctagttggctttgcaattcacggatttggtgttggttgtagcccattaaagaaaccatatccgccgctaaagcaaatcgttcttctttttccgcaagtttaatcgcacgggaaacaaatagattagcagtattatagtccgcaaccatttccgcaatcatcgctggcatctcccagtacttaatccgcggctcttctgtcagcatcccatactcggtatactcagcttgcgtcgtcggaagcacttcaccttcgtctagtagccgttcggccgtcttgtctaatagcatatcattttctgcaagcaatgtggttaattgcgctttaaaagcttggttattgattcctttagcgtaccacttcatttgacggagtttacgccgttgaatcgttaagttagccatcacatggccgatcatggcacccgcggttggtgtatggtgatcaacatcagcttgtttaacttctgcttggtaacgtgtttcgatttcttcattagataacatattaattgccccctatttcactttgatactttgaacgctgtagcctaagtcagttacagcttgtgttaattcatctgggtttgtcacggcttcatcatattctgctttcactttactagcattaaagagaactttcactgattcaaccccatcttgttgactgacacccgcttgaatcttttgcatacatgacggacatgatagctcgtctaattgcatcaccaattttgccatttcaatgaccaccttttcgtttgattactgttactatatcgcgcgctgcatgattaaaaattgaccgccatcaagtttagcgaactttaaaccgaatcaggcgcatcgcattgaaaatcacgaccagaatactaatctcatgaacaaacatcccactagccatctgtacccagccaagcatcaggccaagcaataacaatccgaccgttccaacagcaatcacaatattttgaactgtattacgtgccgtcgccttcgtgaggtaatcggcatacactaattcggataacgtcgattgcattaacacaatatccgaagtttcaatcgcgacatctgtcccagaacccatcgcaattccaatgtcagccagtgcaagcgaaggactatcattaatcccatccccgataaaagccactttttgaccgtttgcttggtaggtcttaatgaattcaaccttctctgccggcaaaagattcgcgtggtattcagtaatcccgacggctttggcaattgctgcggccgtctggtcattatcgcccgtcaacatgactaaatgtttaacgcccgcttttttcaaacgcgttaatgctgccttggcttccggtttaacagtatcagcaatcccaattaataaaacaacttgttggtcaactgcgactaatacggttgattgccctgctgtttgactggccgtgatcgccgcaatctgcgcaccggttaaccggatccctgcttcagtcatcatcttggcccgcccaatccgaattgtttgaccagcgacttcagcttgtacccccaaccctttgagcgtttcaattcgttcaatagttggtaagtctgtcacccctcgttcccgtgcatactgcacaatcgcagtcgccagtggatgatctgactgtgcttcaaccgcggtagtcactgccaacgttgcttgttctgccgctgtataaaattgcacatgtgcaactgccgtgtcccctttagtcaatgttccagttttatcaaagaccatcgtatcaatgccagccatcgcattaacgacttcgccgcctttaatcaaaaccccatgcttcgcgccattgccaatccccgccacgattgaaactggcgcaccaattactagcgcacctggacaaccaagcaccagaatcgtaatcgcgagtttaaagtcgcgcgtgattaagccaatcgctaatgccaacactaaaacggccggtgtgtaatacgtcgcaaaacgatcaatgaatttttccgcgggtgacttactatcttgggcctcttcaaccaattcaataatttgggcaaaagttgtatcatccccaacctgcgttgcggtaaccgtcaatgtcccgttatccacaattgccccggaataaacagcatcacccactattttcttaacgagttgtgcttcgccagtgatgctagcttcattgacataggcactaccttggacgacttgcccatcaaccggcacctgagcgccagctttaaccaatacttgatcatcgatttcgacatcatcaacatctaccgtcgtagtagtgccatcggccgctaacacttgtgccgtttgtggcgccatttcagacaatgcgcgaattgattctcgtgtctttttcaaggttcgttgttcaagatagctcccgaataaaaagaggaacgtgacaatcgccgattcattgaactcaccaatgattagcgctcccaataccgcaatcgtgaccagcaaatcaatgctgatgactttcacttttagcgcttgatacgcctgcatcaaaatcggtgcaacccccatcattgacgcaaccaataacagcccttgcatcacaattaccgccccaccaagccaataccagccataggccactgcaatcaatccgccaacagtcagcgcaatctgattcttcacggattgtaaccatctttgaaatttcatttaaaatcccttcttcctaacgattgtctttagtatagaagaaagccgattttaagaacttgatggttatcaagtttacccgaatataacagacaaaaaagcacaatcaacgattgtttcgtcgattgtgctttttcaattcgattaggcttcaaacccattttgatcagcgacttgcttgaaccaatgacctgattttttaatcgtccgttggtaatcatggtctaagtccaccgcaataaaaccgtagcggttcttataggcgttggtccatgaccagttatccatacacgtccacatatgataaccgagacagctactcccttcttggagggcttgatggacatacttcaaatgatcctgtacaaattcaatccggtagtcatcattaatctggccatccgcattgcgataacgttcttcgccttcaacgcccatcccgttttccgaaataaagcaagcaatgttgccgtagttttcgcgaacgtttttcaaaatatcgtaaatcccacgttcgtagatttcccacccgcgatacggattgactttcttacccggcatatcgtaattgtcgaaaaaatcattcggcatcgggccgtttgtatggtcgattggggtttccttggccttcacgcgccgtggttgataataattaattcccaataaatccacagtattcgccttaatcactgccaagtcagctggttgatagtcgggtaagatggctagatcttttaaaatcgcgaccaaatcagcggggaattcccccttcacggcaggatctaagaatgaacggttgaaaaaagcatctgcaatttgtgcggctttcacatctgccggattagtcgcatcccggggataacttggggttaagttaaggataatgccaatttgtcccccttgattgcgtgcgtgatatttttgaatcgccatcgcactcgctaatgtttcgtgataaccaacttgtaccgcatgcgctaaattaatttcagctggataatggaactgatataaatagccgccttcaaccggcacaatcggttcattgtgtgtgaaccatttcttcacccgatccccaaataattcaaaacaggtttcagcataatgaacgtaagcatcaaccgtctcacgattgagccaaccaccttttttctggagtgctagcggcatatcaaaatggtataaattcataaacggttcgatgccgtttgcgattaattcgtcgatgtacgcattataaaaatagacagcttgtagattaatctcccccgtaccttgtggaaacaaccgactccattgaatcgatgtccgaaaactattgtgtcctgtttgtttcatcaattggatatcacttttgaattgttgatacacatcagaggtccgcgctgggcccacttggttaaaaaacttttctggcgcttgttgataccaataatcccaaatattatcgcccttaccatcaccgtcaatccggccttctgtttggggaccacttgctgctgaaccccaccaaaaatcctttggaaagtcataaaaagtcatcgctagcactccttcttgtttgaatagcctcagtatatcagcttctttttaaaaaaccaactcttttatttaaatgtctagacttttcaaaaagagcgtgctatattgagaatgtaatcgattgcaaacacatgtaaaggacggtgctctacgtgaatacttttatggacacgcttagcaagaaaatcatgcctttcgcaaataagttaggccaaaatcgttacctaactgttctacgagacgcatttatgctttcattcccactgacgatgtttggatcaatcattgtcgttatcactaacctgccatttttcaacgatgccaccaaagcgaccctaacggaactccttggtaatggacaaaatgccacaatgtcaatcatgacggtcttcgtcacattcgggattggttattatctttctaattcatatgatgtggacggaattttcggcggtgctgtttcattcgccagtttcctaatcctcaccccattcatgatgaccaccgataaaggcgttgacgttagcggtgttttaagtctcgatcgacttggcgctaaagggatgttcattgggatgattgcggcatttatcgctgcagaaatttattgccggattactaaaaaaggctggcaaattaagatgccagacggtgtcccacctgcagttgcgaaatcattcgccgctttaattccagctattttaaccttaaccattttcttagtcattcaagcggcagtcactggtttattccacgtaaacttgcacgacgtgatctatgaaattattcaaaaaccactcgttggtttaggtggcagtcttcctgcaaccctaatcgcattgttctttgtccaattgctctggttcttcggtcttcacgggcaaattatcgtcaactctgtaatggatccgatctggaacacattaatgctcgaaaacttggaagcttacaaagctggccatgctttaccacatattgtcacgaaaccattcatggaaactttcaccgtaggtctcggtggttctgggatgacattagccgtcgtcttactgatggcctttatcatgaagaaaaaacaataccgcgatgtcggacgtttggccttggcacccgctgtcttcaacgttaacgaacctgtcattttcgggttcccaatcgttttaaacgccacaattttcattccatggctgattgcaccactgattgtcacagcgctcaactacactgtaatggcaatcggattggtgcctacgccaactggggtttcagtcccatggaccgtcccaatcttcttcagtgggatgctcgcaaccaactcagtactcggcgggatcttacaactcattgacgttgtgctagtcggtctcatctggttcccattcattaaaatgctagatcgccaaaaagaccctctcgcaaactaaagattgttttaccccgttgtttccactaaactataagtagaaagcggggtattttttttgccaaaatacgaagaaattgccaacattattcgacaacggattaaacaagggcgctatcctgctaatacgttgttacccaatcaaaccgacttagttcaagaattcgatgccagtcgaatgacgatcaaaaaagcaatcacgattttaacgatggaaggactcgttctatcacgacgcggcgctggtacaaaggtgttagaccactctttttggaataaatcaacggcaccggcggatcaataccgtgggatgtcacgtgacttagccgacattggtaaaacactctcaagtaagatcatcacgtttgaggtgactttcccaacacctgagattaaagagcgcttaatgcttgctgatcaacagcccgtctacaaaatcattcgactgcggattatcgacggcgttaatagcgtcctcgaacatacctacatgccagtgagcctagttcccggattaactgatgatgttctcgcacagtcaatctacacctaccttaaggagaacctacacctcacgttcgcgggcgcctttcgtaatattcaagccgataaggccgatgaatatgaccagcaatatctggactgcgccccaactgatcccgtcttagaagttgagcaagttgtttatctcgataatggccaaccgattgaatactcaagaagccgcaaccgttatgatcgccgcggttatacattcttagacgttaagaatacttaattgcactaaaaaaagcctgccagcatttagctgacaggctttttctattgattatttttcgacatcttgtaatttttggttgtcgtctaattgtgagcgaccaccgttgccgattttttgtaaatgattcattcctaaccataatagcaagagtgctacgatgatgaaggctaagagaacaaagaatgattgaacaatttgaccggtacctaaaccagatgtaattgcttctctgagccctagaattgaatacgtcattggtaagaatgggtgaatgacgttgtagaagtggttcgtgatttccattgggaatgtaccacctgaaccccctaattgaagcatcaagaggaccattgctaagaaacgaccaggattatcaaatgtcattgataagaacataatgatcgacatcgaagcaagtgagaaggtaattgccattaggaagaattgtgctggatgatcgacgtttaatccagcaaccatcattaaggcaggttcgataattgccatcccgacagcgactaaagcgccaaccgtgattttacttaagaaccatgctgttgatgattgaccagtcattgagatcttccgaattggataagcaaagttgaagacaattgcgccaacgaacaatgctactgaaaggacgtaaggtgctaaggcatgaccgtagttaggcacatagctgtaatttgaatgtttcaattcagcaggtgcagcaaacatatcggctgtcttatccgttaattgaattgagttaacttcatttgcaccagatttcaatgcagatgctaatgtcttattaccatctgttaattgaccagcaccatctgttaacttagctgagttatccgttaattgatttgtaccagcagctaattgatcaacaccgcttgttaacgttggaatttgaccatttaattgaccaagaccattgttcaaggctgttgaaccagtagccaattgactgataccacttgtcaattgaggtacttgggcatttaaagcaccagtaccggcagcaagtgcagatgaaccagttgcaagtgcagatgaaccgtttgctaattggctaacaccgcctgttaaggctggaatttgaccattcaattggtttgtaccagcagctagttgtgaactaccagagacaagctgtccgttcatgcttgttaacttattagccccagctgcagctgttgcaacaccagttgtatattgatttaatccagtaatgattgcttgtgagcctgatgctaactcaccaattccggcgtccaattgttggatacccattactaatccaggattagcatcatcttgatagtttaagcctgtttgaatttgttttaagctagaaagcattgataatgagccattaacagcttcggttaacttagcatattcatcagctgttggtttttgagcatcaatcttagcgttaataccactaacaatttgttgtgcttcgtccttagcagacgctttgagttgttctgacaatttagctttgatgccagcttcttgttgtgccgtaaagacaattccagcttgcttttcagcatcaatgatgccttgtgcttttgcatcaaaatctgtcgttgtagcaacttgatctggaatagcattcaattcactttgtaaagctggaattgtagcttgtacctgtgaaatgagcccattgattgatgaatattgagcaacagctgtattatatgttgcttcattttcaaatgttgggttctcatttaacttcttttgcatagtttgtaaaccagcagaaattttttgactaccagcttttaatgcagtgacccccgcaggtaatccactaattttttcatttattttaacattactatccgctaattttttcaaaccagcatttaaatcagatgcaccatttgtatatcctgttacgccagcattcaacttattggccccatcgtttaattgaccagcgcctgatgctaatgcacccgtcttactattcaatgtttggagaccagtatttaattgatttgcaccagcgtttaattgaccagcaccatcattcaattggcttgcgcctgatgcaagtgcccccgtcttgctatctaacaatagtaagccgttgttaagtgtgtttgagccatcagctaattgtttaacaccatctgataatggcacaacacttgttttcatcgtcatgataccatcgttgacttgagcaacaccggctgtataaacatttaaaccatctgataacgttacagaaccgtctgttaattgtttagcacccttggcagcagtactgaaccctttaccggcagtcttaacctgtttgaacatcactttagcgtaagcatttgtgacagtttcccgaacttgggcgttcaattccttggcacccatttcactgataacttcaccgatgaagttcaatgaatcgttggttttgtattgaatttgcatcttcttaggattcttatccaagactgtagcagcattggcagagaagttcttaggtagggtcactacagtgtagtattccttatctttaagcccttgttgtgctttttttgctgatacgaaacgccaaccaagttggtcgtttttcttcaattcttttaccatatctttaccagcgctcaacgtttcaccgttgtaagtggctggttgatcattattaacgacagcgactggtaattcaccagtgctaccataaggatcccagacagatttaaggaaaaagatactgtacaagaatggaataaacacgattgcgattaacgaaatcatgattaaacgattcttggcaatgaacttaaattcgttttggatcatcttcatgctaaaatctcctttaattatataagttgcttaattgattacattcaatatccacgataactaaattagtctaaccttttttcatttaaatttcaagtcttatgcgccaaactattctctattcacaactgtttctaatctaacaaaaaaagacggtcgttatttatataacaaccgtctcccttatggaagaaacaaatgacttcctattaaattaattattttgcttcaatcttcgtcatgccacccatgtatggtaccaatggttctgggattgtgacgctgccgtcttcgttttgatagttttccaagatggcggcaactgtccggccgactgctaagcctgaaccgttcaatgtgtggaccaagttgacgtggccatcttcgtcacggtaacgaatttgggcgcggcgtgcttggaagtctgtacaatctgaacaacttgagatttcacggtacgtattttgagctggtaaccaaacttcgatatcgtatgtcttagctgatgtgaagctggcatcgccagttgccaatgtgatgacgtgatatggcaagttcaatgcttttaagatattttcagcatcggcggtcattttttctagttcattgaatgattcttctggtttcgtgaatttcaccatttcaactttattaaattgatgcatccggattaaaccacgggtatcacggccggcacttcctgcttctgaacggaaagctggtgataaggcagtgaagtagattggcaattgtgcgccatccaagatttcgtcgcggtagaagttcgtcaatggcacttcggcggttggaatcaaagtcatgggttcgccttcgttggtcattgtgtaaacatcttccgtaaacttaggaaattggccagtcccaaacattgattcgccattcactaagtacggcgtaatcatttcttcatagccttctttagcatgttgatccaacatgaagttataaatggcccgttcaagacgtgcaccggcacccttatagtaaacaaagcgactacctgatactttagcggcgcgttcaaagtctaagatgcctaatttttcaccgatatcccagtgtgctaatggttcaaaatcaaattcacggggtgttgaccatttgcgttcttcacggctaaaactttcatctgggccaacgggtgctgaatcatctgggaagttgggtaagcggactaagatgtagtccactttggccttcacttcagccaattcgctatccaaagccttgatttcggccccaacattcttcatggcagcgatttgttcagtcgcatcttctttattgcgcttggcaacggcaatggcttctgaagcagcattgcgatttttcttcaattcttcggtcttcacaattaaggcacggcgtttttcatctaatgcgatgacctcatcaatttctgcagcttgaacaccgcggctagctaacttatcctttgcccattggacattttctcgaatgactttaatatctaacattgcactctctccttttaatgatctttaattaacaacaataaaaaaagccttctcatcccttaattgggacgaaaagacttcaattcgcggtaccacccaagttcacccactacaaataataggtgccctcaattactgataacggccaggaaccgtgtagttcatcactacccactattgcgctggaatgctggattcaataccttccaccaaccggtatctctctgtcaatccatataggcgcttattcacgtgtttacttcttaatgtaagaataccgcatttaatctttaaattcaatcatcaatagatgatttttgaatccatagaccccgtaataaaccgagcatacgtccaaaatgatcgctatctgcattttgatgccatttaaacatcaccgcttctgggttaacgatgccagttaaatcaatgatcgaagtcgtaaccaccatatcagcatccattaaatccgcgtcagattgactaacatccgcatacaaaacactattcagtgcagtcatcaaatcaaagtacccgaggaaggattgttccgtcacaacgacaaccttcactttattcatcggtgcaaaccgttgaatcatctgacgcaagacgttgtagtaaccactgaccaattcttcacgtaatttgactaagaatgacactttcggattgattaataagtaatccaccgtatcatcaatattttgttttaggacatcatttggcttgagatattcaacactttccatcatttggtcagcgagcaccggtgtcacatcttgtttaaacatgtaagtggtcatcgtcatcgaaatcatcgtttgcacgaaaccttgataatacgcatcgtctaagtttaggtatttcttgatgtcaaatggaatttgatcaataaaagcttctacaaactcgtaaatcactggaatataccgcttgtatcgcgtttcgtaagattccatgtagggattagcatcctgaatctgaatcggtccaaaattaatgatgtcatatatattgaatgattcagccatcgcttcttcttgggtcatttgtgcaagaatgctcttgatccgtaaagcttggtcttcaaagggctattttagatattcagaaaccatattgggaactggataacagataaaatcgccatctagttcagttgaaaccgtgtgaccttgtagtaatcggaaataggttacgacgattgaatacgcccctagttcacgggtcaaaatattggttttttccaattggaaccgatcaatcgcaacatcgaacgccttaagtgcatcgtctcgtttaacatcttcaaagggccaggtatgcccttccgttgccatccagaataacatcgttaagactaaacgaattttattttcgtcgccttttaaccgaagtggatcataatacatacggatatcaaatgagcgaattaagtcgcgcaccccttttaaatggcgtagcgccgttgccttactcgtatcatgggcttcccagaattcttggaatgtaacggtctcacccttgagtaagattttgataaaatcaaacgcttctgacttattcactaataaatagtgataggcatctgttggaacgctgaacaaggttttaatatcatcaacatccggtccgataatttcctttaggtccccaataatgctcatgtacatattgtacaagctaccgtaactgcgatttaatagcattgctacttgttttagattcacatcttcaacgagcggctgattattacgcgatagttcaatccgctttttaacaggcaactcatcccgttttaaaccaacaatctccattaataaggcgtacttatcattttccgcttgcgttagaaaaatactctcacttgcgttcaaaccgattccccctagtaaaaatccttataattagtaattaatcgtaccataaattgtgcaaatagtaactattgcgttgtttaaaatcaaagattgctttttacgtcagaaatgctagaatatttaagtgacgtttggttgtaaaacaccatatgttgtatatcaataataatttaaacacattttatggtcaaaagagggagactgatgacattgctcgtacttgctggcacaattggtgcaggaaaaactagtttaaccaaatatctatctgatcacttaggcactgaagccttttacgaatcagtagacgataatgaagtattaccattattctacaaagatccaactaaatatgcattcttactacaaatctatttcttaaacaaacgatttgatagtatcaaacaagcatatacagatgataacaacatcttagaccgttcaattttcgaagattcattactcttccacttgaacgctgatcttggtcgcgctaccgcaaccgaagtccgtgtctacgacgaattattagccaacatgatgcaagaattgccatttgctgcccacaagaaacgccctgacttattaatccatgtacgcgttagtttcgaaacaatgctttcacggattcaaaaacgtggtcgttcatacgaacaactagaagccgatccaaccctctacgactattataaagaattaaacagccgttatgatgcttggtatgaagcctatgacgaaagtcccaagatgcaaatcgatggtgacaaattagacttcgttgaaaacgaagctgatcgtcaaaaagtcatcgaaatgattgacgaacgggtgaaagccttaaacgcagaacaagaagcaaatatgggtgcctaattgcacaaaaaaagccgttcgacaaattgtcgaacggcttttttattatgcttgggtacctttttgcatccataattcatgaataatgccatacagccgggcatagtgatcgctactagcctttaagcgccacgtaaaatacaacgcctccggattaacgttttcgggtaaggcaatgctcgacgtccgaacaatcaggtctgcatcccgtaaagcttcatcggtcgtactaacagcgacatatttgatattatcgagtgctgttaagatatccatatagccaatgtaatcttgctcaatcacgagtgcgaccttcacctggcttacaggatgatactgctggatgacttgttgaattaaattatagtaagcctttatcaaattctcccgcccacttgctaaaaaactaaaagctggttcgaataagaggtaatctacggtatcactaatttttttatggagtagttcattgggttttagctgcggcatacgaatgactaattcattaaaaacgacagaggtcgcgtccatcccaaggatataggtcgtcaccgtagtcgttaacaacgcatttttgaaaatatcatatgtgtgctgcgaaatctctaactcatgcataatatcaaatggaatacgctccaaaaaggcagtcacaaaacgatgaatttctggtatataacgttcatctgcccaatcagcagtcaccttagtacttgttattgagcgtaacggcactggacaataccgtaacaagaagaatagtccagcggcttctgaacgcccttccgttaacgttaactctgccaaacaagttcgtaatcccattgattctttagtgaaatcggctgcaagtaaatcactgattaaattaggatagggataccgaatagttgctaatttttcatcgggctgcacgactgcaccggccatcactcgataataagttactgccagaatcgtggcgccaatttcgtgcgttaataggttaggcttttgcaattgaaattcatcacagacatagtcaaaggccgacaaaacacattcgtgattgatttcttcaaatagccattgatgcccaccagacgccaaccagtataaggcggataagaccaatcgaattgtcttctcatcaccttccaaccggattggttcgtatgaaacccgtaagttgaaggcgcgggttagatcgcggacttgcttcaaatgacgtaatacagttgctttactactatcatgctctgctaagaaggttttaaacgatatatccccgccccgcaatagaatctgtacgaaatcatagatgtcagaatgttgtactaaatataaatgatagacatcacttggaattgcgaagagtcgcttaacatcatcttcctccgtccctaatattgcctgcagatccccaacaatactgacatacgtattgtataagctactataattacggtctaacaatgttgccacttgcttcaaattgacgtcatcgattagtgcttcgccctttttagccatgctcattcgttttctaatgggtaattcatcccatttgacattaataatatctaagaaaagagcatacttatctttttctgccgatgttaaataaacactattggtatccacattgcctaaccccttgttccaaataattgatatatattttaccatcaatcgatattaaagcataaccattctacagcgatatttgttgcgtataacaaaaggcgatgcgttattaacacacaccgcctcaaaagctgaaaataatttcatcatcagctctaattaaacctgacacgctaataacttaaatcaccaattgccatttcaaatcagcattatatgggccaatctgataagcatcattataaggtagtgataactgcaactgactttgtttccaaccaactgtggttccataactcgttaaatcttgctcactgattggccgctgtagaatcccatcaatccattgattatcgggtgactcattagttaatgcttttgcatcactatcatttaagcggtatttaaaattttcttgcatataaaagggattattgggtcgttgatttatccccagatagcctagttgtaaatcaaaatgactacacaacggattacatatgactactttcggcgcttttggtgtaccagtatctgccacttttagttgtacacttggtacctcatttagcgcaatcgtccgattagtacccccctactttgacccaaaatttcgtcatcaaacgtaattgttttcgggatgccaacctctactgccccgtttaaagttaatttgaattggaatttagcgattggatttaaatcatcatttgcaataggtgcacttgccgccttttcagacaacgtaaactcaatgtcgcttgtccgcatgacatcacaatgcagcccttgctccgtagtagtcggattccctgtctgattctgactagcattaattagctgtgccataaagctctccgataaatgcaactgcgaatcggttatcaccggttgccacactgcattttgatctgcattaacacgatagtataacccaaaagaatcaggcgggttaactaggtcgacttgtcctgtaattccgtactgcggggccgcatgcagtgtgccatccgcataattaaactgcgcatggccattcgattttacagactgtgcatttttggcacccggatcagctaatgtgacagagcgaatctcaggcacctgaatgcctggaaaatcgtggccctgaccaaaaacggctttatcatgattgggtgaaatcggagcatcgggtatgtagactagttcacgaataatactttcaagtcgcgattaaattcagtatactaaatttagataaacaaacttactggaggatagtattcatgcggacttggcaaaaatggactttgattgttctgacactcttcttaatacccattatgtattttgagaaccaatattttatgagagagcagtttaaacagtcgcaaaagaatatgcagcagtcaactttaagtgattttaatgaccaagcaagcggtcagtacgcggcctttaaaatctacgctgtagccaaaccgcatggaaaaatctattattttgtcccacaaaaccaaaatggggccaatatcgatttacaaaaacaagaagtcgcactcggtaatcagctttatgcaaaagcacacaaagaatcacccgacattgaccatatcacgttgtacgtcagttatactgctaagaacttgcaagacaatacgtatgcttttaagccaaccgccgaggcttatggttttgtaaaatcacggtttaagacccgttatcaacgcttattttcacaaactggaactgaagccatctatgatatgcagcacaatacaacatcggtttcgtttaaagatttacaaaaagatagcacaacaattccgatgattcgtcaacttgcaattaaccaacaattacaagcccatgattatacccccgaacaacttacacaattggaagcacttgatttcccgggaaatgatcaagcaaccaattttgactttacaacagatggtctaacattgaaattcgcaaagaatcctcttgatattgaaacaattgccctgccaatggcaacggttggtccatacctcaatcccaaccttgtcccagaagacaatcaaatgccttccaaaaaaggtggtgctaaaaagattgcactcacctttaatacgacattaaaacctagcactattacgagtgtcattaatcaactaaacgatttaaacatcaaagcaacttttttcactactggtaaagcagctaaagaacatccggatcaactgaagcaattactcaaagctggccatgtcgttggcacccaagcgtataacaacgatgatgacttggatacaatgagcgcgtcagaaattgccgataacctcaagcaaaccgatgccgcctacttcaaagccagtggtcaattgccacacttattacgggtcacaaccgaaacccctagtacggaattaacaaccgctgctagccgggcactaatcgcttggagtgttgattcggaagattggcgcttagatattgatgcgccgacaattgccaaaaatgtaaatgagcgtattacaggtggtgatcttgtcctactgcacacaagtgaggcaacgattaaggcattacccgcaattgctaaagaacaaaccgctcaaaaacgacatttcgtgacagtcaacgagctcttcaagcaacgattaacaccttatcaacaatatttcaaagctggtgatcaacgctcgctacaataacgcaaaaaggcccgacaacttaaattgtcgggcctttttgtaatctaaacgtgctccgtaagccgcacgctatttatgttttgataaatcaacttcttctagtggaatcatcttagttttgtaccgtactttatagtaaacatatagtacgacaaacaatggaatgctcatataactaatcccaatcgctgtccaatcgaagttcttaaaggcttgaatatcttgccctgcaatcaccaataaacaaagcacgaatgcaaaaatgggaccaaatgggaaccaacgtgcatgatatttcaattcgctcaactgatgaccttgtgccttgaacgcacgacggaaacgataatgtgacacagcaattcctaaccaagcaataaacccagtcaacccactagctgccactaagaataaataaatccgagttccaaaaatacttgtcacaaaggttaaagctcctatgattgttgtcccaatcagtgccattactgggacgccacgtttgcttgtcttagcgaaaattttagctgcatagccatcttcagccattgaccacaacatccgggatgaagcgtacatccctgagtttgccgctgataacactgatgttaagatcactgcgttcatgatgctggctgcagaagctaacccagcccgtttgaacactaacgtaaatggactaacagcaatattcgtttcactcgcgcccaacaatgagtggctatcataaggaattaaacaagcaatcacgaagattgaaagaatataaaatagcagaatgcgccagaaaacttgtttaatggcctttggaatactcttttctggggtctttgattcaccagctgtaatcccaattagttcggtgccttggaatgagaagccagcaatgacgaagacactcaacatcattggtaacccaccaacaaatggggccttcttataagtgaagttactcaagccagtatgatggccacccataatcccgagaatcgttagtaacccaacacctaagaaaataatgaccgtaatcactttgattaacgcaaaccaatattccgtttcgccgaatgatttaacactcgtgatgttaatcaagaaaattaataatagtgcgactaagctaaaaatccaccctggcatatcaggaagccagaattccgtaacgagtgccgcggtactaatatcaaccgccaacgtaatcgcccagttaaaccaataattccaccctaacgcaaaaccaagggctggatcaacaaaccgcgttgcataggttgagaaagaacctgagacaggcaagtacgttgccatttcacccaaactggtcatcaagaagaagaccataatcccaatcccacaataggctaacaatgcaccacctggacctgcctttgcaattgctgaaccacttgtcacaaacaagcccgtcccgatactaccgcccaacgcaatcatcgaaagatgccgcgtctttaactcccgcttcatttcatttcctgccataatacttcgctcttttctctatgatttcaagaaaaagccccaaccacgttctagcaaacaaaaaaacagtctttttgtctgctaaaaacgacaaaaagactgatagccttataatatccgttgatagcgccccgtaacatttcgttacgacagtccttgatttattcaaccaagtcccaacatcaaaatgaataagcaaattgacatttcggcaaattcccctttaattatccctcattactgcttagtcagttcaggataacgactcatggtttttgcgacctcttatcttgttagaaatgagtatacagaattcacacaaccacgtcaattatttccattaaaaaaccacgattatttcaatcgtggttttcattttgcttattgttctttatctttgcgtgatttccgccataaaagaattatcaatagtaggataatgacaatcataataccgataatgacatataaccaccagttattgttctctggtaattcaacggccttatcgttatattttgcaacttcctgacgggtaatctcgcttagtattggttcctgtataatcaatcaatccattttcattggttgtcgctgtcgtaggggtcacatcgaccgtaattggttttgttccactattttgaacccgcacaccaacttcttgttttcgaccaggagtaacttttaaatcataatagcccaactccgtatccgtttgattatcaggatagacgggcgtaaccgaataagtcactttctccgcctgaactggttgatgactaaccatcaacatcaggccaaaagtggcaaccaccgctaataacaatccaaatcgttgcttcattcgtctcattctattcgctactccttctaattcagagtacgttttatgtaataaaataataagttttcagcaaatatatatttttaattttggtgttaattattttcttcactattaatcttaaccctttgttaacaagtggtacggcgttaattggatatgccattgtccattttttaaataaattctcaattttctgaaactatcaactaatcaattgaaaactaattttcaatttcagcacaaaaaaagcaatccaacaaccggattgctttcactctattttaaatttttaatgatcttctggatgagtaattcacgctgttcggctgattgattccaatcaatcactggaatggcttggtgcccaattgtctcaataatcaagccagaaacagtttgccgttttaactcgttcgcccatagcatgtccgccttgtggaacgcagcgttaataatcaatgttccttgtttagcaacgggttggaagtcattgaagaccgtatccaacttacccgtatctggataagacttaatttgtccttccgtggccaacacaacatcgtagattgaaacttcatcagctggccgcgctagtgtaaaaccaccactattaccagaagccgatttcactagcccagccactactaacttacgaataattttgcgtaggtaagtctgtgacccgcctaagcgatgatgaatgacttcagacgaaattgtgtgttcaggatcttgcgtcgccaaaagtacgataatacaagttgcttgttcaaacgcccgtgttaaatgcattagccctatcccctttttaacagtcgcgcactacgcctttcgcgtcttagtgaatgaaccagaggattgacctgcatcggtttgtacctcaaacccatatttttcaagaatgtgtgcaactttcttaaaatcatctctatcgaacgtactgatattaccatcaattgtttcaatttccaacttattcgctaaattacagaaggctttcactgccaattgtgctaaaccaagattttggaaatcataaacagctaagcgtgaagctgctcccaatgtttcaagaactgtaatgtgcatttcttttttccatttattggtttcaaataagagttgtgcttgaaaatcaaccgttgaatgtccaaagcggtcgacgttagcgtatggtgtgtagacaaaaatcgaacttgtcgattcttgttgaccattttcgcgatagtctgtatagacgatgtactgcttaaccttttcatcattaacctgattcatacttgatagaatcgtcaaattttcgtttgcctcaatttgcgctaacttccgtgcataggcttggtcgttttcgtttgccatttgattaacccccatttgtctttcaaaccgattataccatagctttctcatttaaaccgtgatttattacggttataaccatgttatttttacaatttgaaaacggtcactattcggcggtagtactgaactcgttgcccgcctaaataatccggtagttgtgattgataagtcttctcgaactgaactttctgtaaactcgcttgcgatgcttggttggttaaaaagcaggccgcattaaaggtgtttacaccagtttcttgcgcataggcttgcatcgttgccggcaatactgcgctgataatcccacatcgttgatatgccggtaagatggcaaaactgagttcatatgccgcgactgattgtccatctacactaagggtaggggcgagcattatcaatccttgcaccacctgcgttgcgcgatcaacaatcgcccaagcatcctcatcattcatcaacattgttagaaacgactgtgcttcttgttgagattgaaaagccgtcatatttagctgcgtcacaatctttttttgacaaccaatttgatagaccacttcaagatccattagttgaaaatgccgtagttcagttgtggcagtcctaatctgcatctggaacaactcctttgtcatatcaacactcatagtaacccacttacagtgttgcgccaagtaaattcttatgtttccattaaacaaaagcgccaaagttgtggtataccactttttcagtttatactaataacgattaattactcttgtagaaagcgagcataccgatgacattccgcgattatttccatttattttcgaccgtttctcaacaagccgaatcctatgattattttttacactttattgagacacctgttcctgatttacaacggtatcccgaattaactaaaatttgtgattgggccgcttatgatgatcacagttttcgtctgtggacaagcttgcccctcgacgaattcgagcagcgttttgctgaaattgtcccattaccaagcgattcttaccagttagattacagttacaatttgcaagatacaaattttttctaaagttcatgcttgacttttaattcgaactaccgtaaattgaataacaatcataagtcatcttaattcaaactaagtagtgcattatctgggtgtcagaaagtcggtggttgctgcgaaccgattagggtaattgttacgaaatactgaatggatgattcggctaattaacaggaccgttatcacctgtaagagtggtgtgttaccttaaaatgacacgttaactgggtggtaccgcggtttccaatcgtccctattcgcatcagcgagtagggactttttttgtagagtgcgtgatttagcgcttaatatctaaacatttgcatagaacattgccaatcaaaaacacatttcaactatggagggattttcatgttcaagattgcatcgtgcgggggaatcctccgttatcagtcttttgtcgcaccagcctaaccattaaacttaaaaggatgcgatttaaatgacaaaacacaaaactagtttattagaagcaagtatcgttttacttattctgctagccatcatgggtagcggcgtgattgttttccaactttcaccacaaacacccgtcttaacggcgattgccctcttgattctatgggcccgttggcggcactttagctgggacgccattcattctggtatcgaagatggtctcaaaagcggaatcattcctatcattattttcattctcgtcggcgccttaatcagtatctggattgccgccggtgtgattcctagcctgatggtctggggcttcaaaatggtcagtgtccactggttcattccctcgattttcgtcgtctgtgcgcttgtcggcagtgccatcgggagcgcctttaccgtcatttcaaccgtcggcattgctttcttcgggattggagccacactcggactaaacactaccatcgtggccgcagctattatttccggggcaatattcggtgataagtcatcgccactttcacaatcaacaaacttaaccgcagcggttactgaaacagatctatttgaacatattaagaacttgatgtggaccacggttccagcgtttgttggctcattaattttatacgctatcattggccacacctcgaaaaatgtctccctcgataaaattggtgcgacggttgctgtcttaaacacgcacacttcagttagcctacttgcactaattccaatcatcttaattttcgtttgtgctcgccttaaaatgccagcaattccaacactctttttaaacattgccgtttcaatcggtttaatctttttccacaacccacacacaccaattgctaaaattgcgagttacattgaaaatgggtttgttgcccacaccggcgataaaagtatcgatgccttgctctcacgcggtgggattaatagcatgttaagcaccgtcgccttaattatcttgaccttaaccctcggtggcctcttaatgaagcttggtttaatcgaacgcgtgatggcccctcttgctacccatcttaagacgccaggtcaattgctcagcgccgttattgcttctgggattggcgttaacctctttatcggtgaagaattcctttctgtgattctccctggtaaagccttcaagagcacctttgaaaaatcaaacttgagtaatcttgctttagggcgcgcccttgaagatggtgggacagttatcaactacctcgttccatggggcgtcgctggcgtttttgccgctaatactttaggcgtccctaccttgagttaccttccattttgtttcttcagtctcttatcaccaatcttctcaattctcagtgccgttactggcatcgggttaaagagaaaaaccgcctaaacacgcaaaaaaggcccaggataaaatatcctgggcctttttttacattaattgcattaggaattgaccgccatacaccagcgcaaaactatacactgcaattgaagctggcttgcataaaataatgatccatgtaaatttcttcaatgacatctcggtgagcccagccatcaagcataagacatcgtctggtgcgaccggtaagaaaatcgcaagtgcgaagaagcgcacaaagtttttcttttccataattgtcccgatatacttgtcatacgttttttcactgatgacgtgtaagatgaacggcttcccaaattgtcgtgctaataagaagttcaagatagaaccaattgcaatcccgacgtaattataaacaaacccccaaagtgggccgaataccaaaaccccggctgcggtgctaatcccgcctggaatgacaggaatcacaacttgaataatctgaatcgtgatgaaaatcagcggaccaattagcacagagtgccccaaatacgcctgcaacgcggtcgtgttattaaaaagaccaagccgagaccaataaatagccaatgagatgcttccgattaatgccatgagagacgttgcgctgattaagcgtcttgaaattgttctactcatccgctgaattccttccaaggttaattttaattataatttaccacattcaacattattttttatcggtcgctagtctgatttaaaaaatcttaactttctaagaacgtccgaaatggtttcaatccttgtgcatgatatttttcaacaaaggccgctacttctgctggatcctgtgtttgatcatcaatcacgagttgttcaacgggtaacggacgttcgttagcaattttaacatcaatcacaacaggttccttcgtgcctttagtagcagcaaaagcagctttcaattcagctaatgtccgtaccgtaaatccttttgcgcccatcgctgttgctgctgcaccgtaatctgccccttgaatggcaacccctgagtgtggttgacccttatcatcttgttcagcttcaatgaatccgaatgaatcgttgcttaatacaacgttgatgattggcatttggtatttaacttgcgtgataatatcttgcatcaccatcgtgaagccaccgtcaccactaatcgaccagatttgacggtcagggtaggcagcctgggtcccgattgctgcaggcactgcgcaacccattgtggcataccatgctgataacgtcatacgttggcctggatgcattttcaagaaacgcaccccatcgattgaaacattcccaacatcgagattaaagatggcatcgtcagtggccatctcattgatttgtttgaagacgggttccacacgtaacggtgtttgatcgttttcttcaaaactggctttccattcattccagttttctttgttggcgagtgctgctttataaaaggcagattttttggcaactggttcactcgcggctagcaatgcctttaatgccgtcttagcatccgctaaaattccgacatccacatggtgtctgtgtcctagtttagtaggatcgatatcaatttgaataaatttggcatctggcttgaagaagtattgaccgaattcataattgctaccgacaaataagattagatcagcagcttctgccaaatcaactccgggtttcgtggctactcgcccagctgaaaccatataagctggatggtcatcggcaacaatcccttttgaaagggctgatgacatcattgggatactcaaccgatcagataaagcaaccaattcttcacccgcagcacgtgcaccctgaccaaaataaataatgggttgttttgcatctttaattaactgtaatgtacgatcaatatccgcgcttcttggctctggataattgcccatttggaataagtttgcagtggcctcgaagttatcttcaatcggttcccagcctaggttagttggaatcgtgacaactgctacgccgcggtgtttataggcttgttgaatggcttggtcgactacaagtggcatctgttcagccgtcattaccgtccgattatagactgccacatcagcaaacatggggttttcattcatttcttggaaataatccgtattcatcacacccgtagcaacttgtccaactaatgctaatacaggaacattatcatatttagcatcatagagaccatttaacaagtggactgcaccaggtccggctgagccaaatgtagcagcaatcttgccagtcgctttggcttcacccgccgctgctagtgcaccgacttcttcatggcgcacttgaatgtaacgcataatcgctttctggttatgtagtgcattcatcgttgaatcaaacgagccaccgggtaaaccaaaaatatggtcaattccccagtctgccatgacttttaacattgcatctgatgcgtttattttctgtgctaccattaataaagacctcctgatgattttatgtttcacttacttaagtataccgcttaaaatgtaagcgttacaaataatctaataagcattggggggttgctaaaaatgacattaactatgtgtcaccgaagcaacttattgatcaaatttgtaattccagaaaagtcggtgctaatttattaattaataccgggcttgaatttgacggtgccattccagcattttcacagtcgttattgaagattgtcggacaatggatgtcagtttatggagaagcaatttatgcgacaaatcattatgaaaatcagacctacttggcaagtggcgagacaaccgattttatcaaaggaaactatctgtttgtctatggtttaggtaatataggtaatagtaatgttgtgctgggtggcgaaaaggcgcggaagatagtgtttaatcaatatccgcaacgcgtaactagcatcacttggttagataatcaagcgttgtttgagtttgagcaggctttagacgggacgctaacaatttatgccaatgcttttcaatatgggacacatttaattgatcgcgtagccactataactgtcgaagactagtgacgaggtagaagatgaaaacaaaagatgtaacgattaggtatcaaaaaacagcgacggttcatagtgatcgcaatcaactggcttggcttggaaagatagcagttgggacatgtttcttgatgtacgtgtcatatatccaacaaattatggctaatttagctgggcaccctgtgtcggcgattcaaccaagcgttgcgatggttaatgcgactttgtggtttagttacggttggtttaaaccacataaagattggccaatcatcatttcaaatgtcccaggaatcatatttgggctggtaacattaattacaatttattaccattgatagcaaaataacccgggtcaattgacccgggttatttttttgatcaacttacgctaaattaattgacaccctttatgaatggtatggtaccataggcgtaattagaaaagcgaagggattcgggcgcatgcgacgttctaaatggataataatcatcattggtttaggagttttaattggcagtggatggtggcttttagggaatgcaacgacgcaaaaagcgcagcaagtcaagcaaacagaaaatgaacagcccactttttatttgcatggttatggcggttcggctcgttcgactgatagcatgatcaaagctgctcgcgaacaaaagaatgcgacacaggtcctcactgcaaccgttcgtaaggatggttcagttgatttacaggggcgttggttagctaaaacgacacgaccaatcgtgcaagttgttttcgaagataatcgcaatcctaactatcaacaagatggtgagtggtttaaaaacgtcttagtcgcggttaatcggcagcacagcttcaaacgattcaacgtggtggctcattcgatgggcaacttgacggccgtttattatttattgaaccatgcgattgataaacagttaccccgtatggcgaagatggtgaatattgcgggtcattttgatgggattatcgggatggatgatcagcctaatcaaaaccaggttaaaaaggatggccaaccacaaaaaatgaacgcgacttatcggcaactgatgggactgcgtaaccagctccctgctaaatcgattacggtgttgaatatctatggggatttaggcgatgggacgcattctgacggacgtgttagtaatgcatcgtcacagtcgttgcggtatttggtgacgcctggtgcgaagacctatcaagaaaagaagtttactggtaaaaaagcgcagcatagtcaattacacgaaaatcatgcagtcaatcaaactgtcttagcgtttttatggtaaaacatacttaaaaagtggtggcgacaaaaattaattttgtcgccaccacttttttaatgttcaagacggtagtctcgcgctgcttgttcgagattcgaaatgagagcttgttgttttggtgagaagaactgggtcttacgataggctaacgagatataaaagattggttgtggttcatccaataaatcaagtaccactaagtcatcagcaggcgtaatactggtttcagttagaaaaccgatgccgacattttcgtgaatcatactttttaagacactaacgtcattggtgcggtaaataatttcgggtttgatttgattgacgtccgataagttcttgaagaccacggtatgcacgaatccttccgcgagcataataaatttctcgtgggctaaatcacgaaaggcgaccgctggtttctgggctaagggactatcaggtgcaactacaatcttaaaatggtgacgttcgatgactttagctgtgatggtatcggtttgaagtggcgtcgcagagccaagaagcgcgacatctagttcaccggcttctaatgaagccaacaattctttggaacccccatcagctgtcttaaaatgttgaatcgtgccgttagcggctagcttttgtgctaattttgagaagtagtaagtgccgataattggtggcaagccaaaacgcaaatcagtagcgttgagattgagcatgtcggcctttgttagttcaatctccgctaatattcgcgcggcatgttgataaagttgctcaccactaggggtaataatcaatgattggtgtgattgatcgcgctgaatgagtttggtcgcgaattcatcttcaaggcgtttgaccgcgtaagtgatcgtcggttgactgaccttgaattgatcagcgactgccgtaaaattttttaatttaattagcgcagcaaaataggccaaatctttaatcttcataaaaactcctgtttaatgcagtttagacgtttcatataaatctattttatcataaatgtaagttttgactatcaaatgttgaggcgtgtatagtgaccaacatgatataaaagaaaaggagatttttaatatgaaagcacaacaaattttaaatgatccatttttaaataagggtacagcattcactgctgaagaacgtgcacaatttggtttaacggggatgttaccacctcacgtgcaaaccattgatgaacaagttaaacaagcttatgcccaatatcaatcaaaagccaacatgcttgaacaacggattttcttaatgtcaatttttaatgaaaaccgtgtgttgttctttaaattattcagccaacatgttgctgaattcatgccagtggtttacgatccaacgatcgctgacacaatcgaaaactacagtgctttatatgtgaacccccaaaacgctgctttcttatcaatcgacgatcctgattcaatgaagacaaccttggcaaacgctgctgatggtcgcgaaattaaattaatcgttgtgactgatggcgaaggaatcttagggattggcgactggggcacacaaggtgtggatatctcagttggtaaattaatggtttatacggctgctgccgggattgatcctagtcaagtcttaccagttgttttagatgctgggacgaaccgtgaaagcttactcaatgatgagttatacttaggcaaccgtcatgaacgggttcgcggcgatcgttactacgatttcgtcgatcaattcgtgcaaacagctgaagacctattccctaatatgtatcttcactttgaagattttggccggagcaatgctgctaatattttgaacaagtacaaagatcaaatcgtgacgttcaatgatgatatccaaggcacagggattatcacattagctgggattatgggcgctttaaatatctctggtggcaagatgaccgaccaagtttacatgagctttggtgctgggactgcgggtgctgggattacccatcgcatcttcgaagaaatgttacaagaaggtttaactgaagaacaagcacgtagccgtttctacatggttgacaagcaagggctattgtttgatgatgatccagaattaacaccagaacaaaaaccatttgcgcgcaaacggagtgaattcgcgaatgctgatgaattaacaactttagaagctgctgtcaaagcaatccacccaaccattttagtggggacttcaacccaacctgggacctttacagaatcaatcgtgaaggaaatggctgctcacacagaacgcccaattattttcccattgtcaaacccaacgaaattagctgaagcagctgctgcagacttaatcaagtggactgacggcaaagctttagtagcgactgggattcctgctgcacctgttgaatacaacggtgtcacatatgaaatcggtcaagcaaacaacgctttagtctatccagggcttggtttaggcacaatcgcttccactgcgaaagtcttaaatgacgaaatgattagcaaagcagctcactcattgggtggcattgttgatccaacagaacctggcgcagctgtcttgcctcctgtgacaaaactagatatcttctcacaaacggttgcgaacgctgttgctcaaagcgctgttgatcaaggtttgaataaagaaccaattgctgacgtgcaaaaagccgtcgcagacatgaaatgggaaccagaatacaaagcactataatttaaatataaatcggtaggagcgtgaaagagttggcagcatttctaacatcattatcaagcgttgtcgaaatcgtcttagtcattgcattggggttttggctacggagttcaaaaaaattcgatgataattttaaaggcacaatttcatttttaatcatgaatgtcgctttaccattatcaattttcgtctcagtattagataacttaacccgtgaaaagttggtcggtttatctggcggcttgatctacgtcttaattagtttcgccctcggttatctcgtggcatggttactaaccaaggctttccggattcggccaggtcgtcgagggacatttatcaatatgttcgtcaatgctaataccatcttcattgggttaccattgaacttggcactattcggtgacaagagtttaccttacttcttgatctactatgtggccaatacggtttcaacatgggcaatcggggtcttcttcatctcaaatgatgatccaaccaaagaaaaaggcgctgctaaaggcaaatttaactggcgtaaattattaccttcaccattaatcggtttcttagccgcattaatttatcttttaactggtttaccattaccagaacttgttgataagacattctcaatggtcggtggcatcgtaacaccaatgtcattgatctacattgggattatcttagctgatgctggtttgaaatcaatccatttcgaccgcgatacagtccttgcgttattaggccgtttcgttgtggcaccagccatcatgattgccatcatgctattcttcaagaacacaacttcaattccatcaatcgaacaaagcacattgattattcaagctgcaacacctggtttggctgtcttaccaatcttagttggtcaatcacatggtgacgttaaatatgcaacgaacgttgtcacaacaagtaccgtcttattcgtggtcgttgtcccaatcttgatgcaaattgttcaatatatctaaagcttaaatgtgtcgttcagctgacactcccctaaatcttacccccagcgcgccgtctcaattaattgagacggcgctttttttgtgcaaagaaacacaaagaatgttgtcaaaggcggcaaagtgcattacaatgaaaacggatttaataatgtgaaggggacgatagcatgacagagaaaatctacactaacttagcacctgaaccattgggaccatacagccaagcgattgcaacggatcaactggtctttatgtcagggcaactcggattaaaagatggccaattggcaccggacttagcgagtcaaacaaaacaagcaatcacgaatatgcaacacgtgttagcggcagcaggattatccctagaaaacgttgtgaaaaccaattgttttttaactgatttggatgactttaacgaattcaatgaagtatatgcgcgattcttcggtgatatcgcaccggctagaagtgccgttcaagttggtaaactaccagctggcgcaattgttgagatagaagcagttgcaattcgttaatgccgtaattgactgaataaacaaccatttgaaaaaagcctccagaggaaattaaatgcatttcatttaatcatctctgggggcttttttgcatgcctgaaatttaatgtttaaagggatgttcatgggtacaaatactgatatataggcattgttgtgaaaatattctaccaatgttaattataaaaagattaaaattagatgatgaaaattgcggataaaatgaagctccagcgcgaccattttgatgacatggaaccgaatacaaatatcggcattaaagaagtttacacatgttgcataatcatagatagggattatctctttaaaagatttaacagattcgttttaaaacaacttgtacacaatttaatagcttgtcagaatgaaaaaacattaagtccaattggtgattaattgattgaatctttgatatcccaattgataactagaccgtaccaaaggtgtagtgatgaatggaaaaatagaaaaatcatatggaggtagacgatggatagaagaaaattagcgctgggtgcaacaatgctgaccatgttattgacgtttatctgtatcaatagtggtcgtactcaagcagcgatacccgcccatattccaatcgatggcatctttaaaccctccattggggtagatagttccgttcaagcaggtggaattgtgcaagtgacaccagatagccagaacaagaagggggcaatttggtcggaagagcagtataagattgatttgacacataattttacaagtttaatgtatgtcaatttaggggacaaaaaagcgcaatcggttgacgggatggcctttgcaatgatgaatgacccagacaaggttaagaattggcagcaagtgaccggtggcgcccttggtgtttggcggaatccattttcttgggtaaaagataactcagcaatcgccaagtcatttgccgttgaattcgatacgtaccataatggcaatgattttgacggtttgctacccaatgatggcccagatagaggccatgttgcttataattttccaggacaagatagtgcatatcagcgtttaccaagtcgcttgtacgcgctaaaccatctacaacttcaaaaaccgcaaaatggtgattatttatcattagtaacattaggccatatcgtgatggcaccaagtgtacaggctgcgacaacatcgaatgaaacaactacgaggaaaattgcactagaagcaggggacacaacaacgactaacccaccaattgtgccagggacagatggaaacggaaacggaccaactggcgcaacaggggatatcacgattgataatttaacaccacttgattttggtaaggtgaaactgactggtggcgcgcaaaacgttaagaatatcgttaaagatcctaacgtacaagtcaccgataaacggggaactggcgctggctagaatattaccgttaaaagttcagaatttaaagacacaacggattcaacgcatatcttaaaaggcgcacagattaattttccagtcggtaaagtagtcgctagtgattcaacgaatactgctgcaccaacagccaaagcgattactgttcctgctgatgggttggataatgcgcaaatcttgatgagtgctgataaagataaagggatgggaacatgggcagatgtgatgacaactgacggcattacactggatatcgctggtggcgcttatgctggcagctataatgctgatttgacctggacacttggggatacaccgcttcaattagctggcagcagccgctaaatttgaaagaggcaagtgttaagtcgttactgcaacggactaaattttaatcgatgtgcaaagtgattaaagagagggacttcaaaaatgaaatggatgcatattttacaaagaatcagcgtcgtcatcttaatgggcggcatcgcgttgtggttgaatacaacgaccgtccaagcggctgatcagagtatgaattaccaagttaaagcgaatttacccagcagtcaaaacaatcaaagtgtaacgtattttgatttaaggctggcacctaatcaggaagagacgattagtatcacggtgcaaaataaggataaccaagcgcatatctttaacatcagtccgaatacggcggtgactaatcaaaacggggtcgttgattatagccagtcaaagaaaaaagcggatgaaacggcgcctgctaatattgcctcactgattacgggggataaaaaagtaacggtgccggctcacagtagcaaggacgccatttttaaaattaaaatgcctgctaagaagttccattgtactttattaggtggttttaatattgttcgtgaagggcagcctaccgttaaaaagcaaaagaatcgcgtgacattgcgtaaccaattcgcttatgtaatcggtctgaaagtgaccgaaagtgatgccattattgcgccaaatctgaaactgaatcacatcaaagcggggctcgttaactatcggacagcaattacggctaatttacagaatacaaaggctgttatgatcagaggcttgaaagttgatgcggtggttaccaagttaggctctgatcaagtgcttcaccggacagtcaaatcagacattgcgatggcaccgaattcgaactttgagtacgccatcaactgggataatgaagcgctgaagccgggcaaataaatgcttaagctaaccgccactgataagtcgggcggttagtggtattttacgagtcggtttaatattacagagcaaaaagcccatcaagctaatgaccaagccgttgatttacaaaaaacaaccattaactggtggtatatcatgcggtggcatattcctggtgctcttagttgggtatattatttttctaaaacgacaagcgaaaaaagcctgattcaatgaagtcccaatcctgagcgcgtcatcgattagaatggattcgaaaataatcccttgataatgaatagatggaagtattatctctattcactaccaagggattttttatatgtgctgcgttattggttgttcggttaattaggtttaaaaaagagggaatggattttatatcacgttatttacgaatgatattcataaacagtggttttttgatgccatttaacgtataataaattaaaaacaaattagagatgaggcaagaatattgatttcgactgaaacgacactagctgggtaccactttgataactgtttcatgaacgcggcgggggtttattgttatgatgctgctgagttaaatcaagtgcaggcttcaatggcagggactttcgtgaccaagagtgccaccgttatgccccgctctggaaatccagaaccacgttatcaaccaacgcgtttaggcagtatcaattcaatgggcttgccgaatgaaggcctaccttattatttagactatgtgagtcaacagcaaaaggcagtgccagacaagacatactttcaatcgattacgggatttaatattgaagaagacgagcaactgttggcacagattagtgcttctgattttaaaggtgtggtggaattgaacttatcttgtccgaacgtaccggggaagccgcaaacgggctatgattttgaaatggtggaacgaattctaacgcgagtttttacggtttatcacggtccattaggcgttaaattaccgccgtactttgatatcgtgcattttgatcagatggcggcgattttgaatcaatttccattagcgtttgtcaattcggtgaatagcattggaaatggcttgaaaattgatgtggcaactgaacgggttgtgattaaacctaagcatggtttcggtggcatcggtggcgattatatcaaaccaaccgccttagcgaatgtccatgccttctatcagcgtttgaatccagccattcaaattattgggactggtgggattaaatctggtcaagatgcatttgaacatattttatgtggggctagcatggtccaagttgggacagcgcttcaaaaagaaggccccattatttttgaacgtttaacgcgcgaattacagacaagcatggctcaaaaaggttatactaaactgtctgactttagaggcaaattacaatatttagattagttgaaatgaggatttacaatgcagtatcgttatttattttttgacatggacaatactttattcgattttgatgcggatgaagatcaagctttggcccaattattcaaagatcaaggggttcaattgacctcaacaattaagacaacttatcagacctttaatcaaaacttgtggcggcagtatgaagaaggtacgttaacccgggaaatattattgaacacacgctttgcaaccttctttaaagaacagtttaatcaggaagttgatggaccaagattgtcccaaaattatttagacaacttggcattaggccatgatttaatgccacaagcagaagctctgttaaaggcgttaaaagcagctaacattaagctatatgtcacaaccaacggggttgccaacacgcaatatcggcggttacaagattcaggattaatcacatatttcgatgccgtttttgtttcggaagagttgggatatcaaaaaccagatccacggtatttccaaagtgtcttccaacaattagaggggatctcacaagcagaagctttgattgtcggtgattcacttacttcagatgtgcaaggtgggcagaacgtgggtgtcgccacagcgtggtataacccgaaccagctagcaaatcaaatgacagacatacagccaacacacgaaattgaacacttaatggacttattggcaatttaaaagccgatttgcggcattcaagaggagtggataaaacatgaaaaagcaacgatattttagaattagcctaggttggcgaatcttaattggaatcggcctagggttagtggttggtcggtttttctaccataatcaaaccgctatctcaatcttacaatcaattggaaccttgttcatcaatttaattaagatgattgtgttaccaattgttgtttcctgtttggtcgttgggattgccaagatgggtgatatcaaaaaacttggccgaattggtggtaagacgttattgtatttcgaagtgatgacgaccttcgcaattattctcggattagctgtcggcaatattgctaaaccaggagcgctgattgacattcatagtttggcacatggctcaattagtcagtacacagcagccgctaagaccgctggaaatcatggcttgggtgatatcatcatggatatcgtgccaacgaatttctttgcggccttggggtctggtgaaatgattccagtcatcttctttacggtcatgttcggtttagggttggcgacctttggtaaaaaggcaaccccgctcatcgatgcttttgaaatgatttcagaggttatgttcaagatgacaaactggattatgcagttagcaccaatcggggtgtttgcattaatcggggttacaattgcccaattcggatttgaagctttgaaaccattgctctatttcatcatcgtttgttacgcaacgatggcatttttcgtggttgttgtggctgggttggtcgcgcggatttggcacatcaatatctttgaaatcttgaaagttttcaaagaagaattggtgctagccttttcaacggcgagttcagaagcagcgttacccaaagtaatggaaaaagtgcaaaattacggtgttagtcaagggattgcttcttttgtcattccaacgggttattcatttaacttggacggttcggcaatctaccaatcgctagcggcgctgtttttggcgcaagcctatcacattcatttaagcctcacccaacaaattacgctattggtggtcttgatgattacctctaaagggatggctggggtccctggtgcttcattcgttgtcttattagcaacaatcaccacaatcggcgttccggctgctggtgtcgccttcattgcggggattgatcggattgtggatatgggacgaactgccgttaacgtaatgggaaactcattagcagcagtcattattgccaagtcagagaacgaatttgatgaacaaaaatatcaacaatatatgagtggcaatgaacttaaataaagcaaagaccttaaatcaatcgatttaaggtcttttttgtataaaaaacgattttagcacaccgcaaacattagcggtatctaattataaaagcttaagtaatgcgacttttagcgcttttttgtcgattatctagaccaatttcgcagataatctaaaaaatgattagacagattagaattttgtggtaaaattaattcagtaaagcgttttaaaaaataaaaacgtggaactgttaactcagtcaataatgtttaagccattatttttttatattaattgatagcgttttattgatgagtatgacaactatttttattaaggaggtttttgtgaatggttggaatcgttattgcaagtcacggggagtttgctaaaggaatcatgcaatctggctcaatgatttttggcgaacaagaaaaagtacaagctgttacttttatgccaaatgaaggaccagatgatttgaaagcgcatttagaagctgccgttgcaacgtttgatgcagatgatgacgtcttattcttagttgatctttggggaggttcaccatttaatcaagctaatgggttgttcgaagcacataaagataagtgggcaatcgttacaggattaaacttaccaatgttgattgaagcttacgcatctcgtttatctatgacatctgctcatgaaatcgcagcacatatcattgatgaagctaaagcaggggtacgggttaaacctgaagaactacaaccagaagaagcacctaaggcagaagccgcacaaacgacttcaaactcaggcacacctggtaagttcaaatatgtcttggcacgaattgattcacgtttattacatggtcaagttgcaacgacatggtcgaagacaactaacccaacacggattatcgttgtttcagataacgttgctaaagatgaattacggacaaacttaattaaacaagctgctcctagtggcatcaaagcacacgtcgtgccagttgatcaaatgattaaattggcaaaagatgaccaacactttggtaaggaacgtgctttgttattatttgaatcaccacaagatgcacttagagcagttgaaggtggcgttccattagaaacaattaacgttggttcaatggcgcactcaactggtaaagtgcaaccaaatactgttttggcttttgaccaagatgatattgatacctttgaaaaactaaaagctaagggcatcaagttcgatgttcgtaaagtgccaagtgactcaaacggtaacatggatagtatccttaaaaaagcacaagcagaactagacaaacaaaataacaaataacatcagaagaaattggaggattaataatcatggatttgaatttcattcaagtgattttggtcatttttatcgcatttctagctggtatggaaggtatcttagatcaattccatttccatcagccagttattgcttgtacactaatcggtcttgtaaccggtcaattactaccttgtcttatcttaggtgggacattacaaatgatcgcattaggttgggctaacattggtgccgctgttgcacccgatgctgctttggcatcaatcgcatctgcaattattttaatacttggtggccaaggaaaagccggcgttacatcagctatcgctatcgctgttcctcttgccgtagccgggttattattaacaatcatcgtacggacattagcaactggtatcgtgcacatcatggatgctgctgctaaagaaggtaacttccgtaagatcgaaatgtggcaatatatcgctattatcatgcaaggtttacgaatcgctattcctgcaggcttaatcttagcaatcggtgctggccctgttaaagaaatgttgacagcaatgccaatctggttaacagacggtttagcaatcggtggtgggatggtcgttgccgttggttacgcaatggttatcaacatgatggcaactaaagaagtatggccattcttcgcaattggtttcgtacttgctactatctcacaattgacacttatcggccttggtgcaatcggtgtttcacttgccctattatacttagccctttcaaaacaaggcggctcaggtaatggcggcggttcaaatactggtgacccacttggcgatattatcgacaactactaagaaggaggctaacaattatggcagaacaattaaaattaacgcgtaaagatcgtatttctgtttggctacgttcaactttccttcaaggttcttggaactacgaacgtatgcaaaatggtggttgggcttactcattaatcccagcaattaagaaattatacaaaacaaaagaagaccgggcagctgctttagttcgtcacatggaattctttaatactcatccttatgttgcttcaccaatcatcggggtaactttggcacttgaagaagaacgtgctaatggtgcaccaattgatgatgttacaattcaaggggttaaagttgggatgatgggacctttggctggtatcggcgatcccgtattctggttcactgttaaaccaatcatcggtgctttggctgcttcacttgctatgagtggtaacattcttggcccaatcatttactttatcgcttggaatgctatccggatgtcattcatgtggtatacacaagaattcggctaccgtgctggttcaaagattacagaagatttatctggtggtattttgcaagacatcacaaagggtgcttcaatccttgggatgttcatcttaggttcgttggttaaccgttgggtatctgtcaagtttacgccagttgtttcatctgttaagttggacaaaggcgcattcatcgactgggataaattacctagcggtgctaagggtatccaatcagccttacaacaacaagctcaaggtttgtcattgacaagcaataaagtgacaacgttgcaagacaacttggatagtttaattcctgggttagctgcattaggattaacattattctgtatgtggttacttaagaagaaagtctcaccaatcgtgattattcttggcttattcgtagtcggaattgtcttccatctattacacttaatgtaaaagagtgcataagcaggcgcctatattttgaggattaactggatttgacgaattggcgatgcaatcgccgatttggcaaatttggttaaccgcaggaatatgcctactgaagcacgtttagaaaacaaaggaggggctaggacaaagtcaatttgtcctagccccttctttttataaaagcgtataatgaaagtaagtttttggaaatggagtcgatattatggttcaatcgattaatacaaaggtggacttagtgattaaagccacgtcgtttacagcactctctgattacggacaaatcatgatcggggatagagggtttgaatttttcaatgatcgtgacgcacgacaatttattcaaattccatgggaagaagttgactatgtgattgcatcagtcatgttcaaaggcaagtggattccccgctatgctatccaaacaaagaaaaatgggacgtatacttttgcttcaaaggaacccaaaaaagtactccgcgccattcgcgagtatgtgcccgcagaacgcttagttcaatcactaggggtctgggatgtgattaagcgtgtgtttaaacgcaaatcaaattaacttcaggaaggtgtgaccaatattggtcacaccttttttgaatcgaattgcctgtgattttaattggtaccgatttgagtggcgtgctagaatatcatataaggttgattgttcaacattttaaaaaattaagttaaatgaggtaatgatcatgggatttgatgaagcgattaatgcaattaaggctggcaaaaaagtggtacggactggctgggatggtccagaattatttattttccaagtggccgatgggacattcgaggggcaagcaattagtccctacctattaattaaaacaaccgaaacaccagcatactcaatgttccaaccaacatcgtgtgatgtattggctgatgattggcaattggtcgactaatggggcattttgcagatttagcgactaaaaccattttaattaccggggcggcatcgggaattgggcgcgctcaagtggccgcttttttagcagagggggcattggtgttagcacttgatcgccagccgattgaagtccctgttgatagtcggtgcatcacagcgcaggttgatgtttgtgatgaaacgcaattaacaatgacattagcgactttgctggcagaatatggcccaatcgatgtggtctgcaacacggcaggtgtgttggatgcttatgcaccaacgcttgataccagtagtgcggattgggatcgaattatggcaacgaatttaaaaagtcaatatcttgtaacaaatgcgatcttgccaacaatggttgcgcaaaagcgtggggtattcgttaatatggcttcgattgctgggctagttgctggtggcggtggtgcggcttatacggcatcgaaacacgccatcattggctatacaaagcagcttgattatgattacgccgctaaggggattcgcgccaactgtatcgccccaggtgcgattgagacgccgatgaacgcagccgattttgcggggactggtgagatggcacaagaagttgcccgtcagacaccagcggggcgttgggcgcaaccaactgaagttgcgaacttaagtgtttacttggcgagtgaggttgcggattacattcatggtaccgtcgttccaattgatggtggctggattgaaaaataacgctgactaaggagattatgatggcaaaacaaattaaattaagtcaaaccgtttatgaattggtaacggcctatcctgaagtggtgccagtgcttgttggaatcggacttgatggggtcacgaacccagcgcttttgaatactgcggggcgttttatgacattgcctaaaggggctaagatgaagcaaattcctttgacgacgattatcgctagtctagaagcacaaggattcgaggtgttagctgatgtgtgagcaacagcatagcagtgcgtaccgccaaaaacgaatcgtggaaatcttaaaaatgctgcatgaaggtggctcgtttgaagaggctaagcggatttttgatgagtccttttctggggttgacgtgtctgaaattacgtctgctgaacgggaattgattgccagtggcttgaacccgatggagattcaacatttgtgtaatgtccatgctgcggttttcaagggggcgattaattcaaatggggctgaaacgccggaacaagaacagccaggacacccagtcgctgtgatgaaattagaaaatttggtcatgaactcgctcttaaatgatgaattactgccatgtttgaagaaatggcagcagtcagggactgaccaaaattatctcgtgcggatgcaacaagcgttaaaagatttacagttgatcgaccgccactatttacggaaagaaaacttaatttttccgttgatggatcaatatggaattactgcaccacccaaagtgatgtggggggtggatgatcaaattcgggggttggtgaagacggcctatcaaatggtaactgcggaaccaattccggataaatatgcaattgaagcagccgttgaaaagatgagcaaagaaattcaagaaatgattttcaaagaagaagaaatcatgattccgatggttaatgaagtctttacaccagctgactggggactaattgcttctgaaagccaaccaatcgggtataccttaattccagacccattaccatggcaaccaagtgctgaagctatcgcggcggccgaaaagcggaccgttccgaagattgcgcaagaactgaatgcgatggcgcaatcgttggcggatgcgcaaatgacgacccaaacaacgccaccagaaccggcaccaacttcgatggcggcagcggctaatattccgtttgaaattcacggacaacctgtaccaaaagcccccgctgaaaaagatgaaggaaaaccagaaatgcctgattttgtgaaggcaatgttagctgacgaaaaagaagcggcaccaaaagcgaaggttcaagcacgtcgggaagcaccacaaccccatatcgaaattggcgtggataaccaagctaaaatcgttctaccatctgggtcgatgaatattagtgaattgacggcgattctccaagtactaccgcttgatttaacctttgtcgatcaaaacgatattgtgcagtggttctcagataacgagcatcgtattttcccaagaacccgggcagtgattggccgcgcggttgtgaactgccatccaccaaagagtgtggataaggttgagaaaattttagcggactttcatgcggggcgagaagaccatgctgatttttggttgaacttccgcgggatgttcgtctatattcgctattttgcggttcgtgatccacagggacaatacttaggctgtttagaagtcagtcaggatttaacggaactccgtgcactaacaggcgaaaaacggttataaaaatgcattaagaggagaaaagagatgcaacaaattattttattacttgccgtcggtgttttagccggcgtgttgggttcaatcttagggattggtggcgggatcattgtaacccccgtattaacgctagcgattggcctagatattaaatacgcgattggggccagcattattgccgtgattgcaacaagttctggtgcaactatcgcctatttgaaagatgatatgctcaacttacgagtggcgatgttcctagaaattgcaacgaccgtcggggcgattatcggggcgttattgaccggcatcgtaccaactggattcttattcatcttattcggcgcattcttgctattttcaacgtacaacatgattcaaaaattacgtggtaaagttgcagaacaacacgtcggcgctggtgaagataagtgggccaagaagttgaacttaaatggcacttactacgataaggccaaccaagaacaagtcgactacgctgttgaacaagtaccaggcggctttgccatgatgttcggggccggcattgcttctggcttgctcggtatcgggagtggggtattcaaagtgaccgccatggatacgattatgaagatgccattgaaaccatcaagtgccacgagtaatttgatgatgggggttacggcagcagcttcggccactgtttatttcttcagcggtgcgattattcccagcgttgctgcaccgttagcaatcggaattttggtaggttccactgtgggttcacggattatgcagtatttgcaaccacgtgtgattcgcatgatttttatccccattttgttatacacaggtttacaaatggtgcttaaaggattcggggtgcatatttaatgacagataaaaaagcagagatggctcaaattgaactcgtcatcggtaaaattttacgcattggggtggcggtttcagcaacgctgctcattattggcatgttacttgcgattattcatggcggtacaggttattcagaatatcaatttccaacgacctttaccgaaattttcagtggcattgctgcatttaaggctggcgctgtgattatgttgggcttattctgcctcattttaacgccagtcttgcgtgtggtggtatcaatctacgcatttgctaaagaaggggattacctctacgtttggattacggttattgtgttggtcatcttaatcatcgggatggcaattggttttataaagaaataaagagtggtttattagctcagtatctcgcgaggattaaaaaaagggccaacgacaaacatgtttgtcgttggcccttttttttgtggtgaattaggctaatccgcagaagataaccgggcttactgcgcactctgatttaaaacgtgctccgacagacatccgcttccggttagctacgtcccgcaaacaatcgacgtcgtcgcttattcacgagattaggctaatcctcagcgtataatcgtctgccgtcgcactctactttgaaacgtgctccgtaagccatcttcttccggttagcgacatcagtcaaatcaccgactttgtcggcaatccgcctgattaagctaatcctcagaagataaacgggcttactgcgcactctattccattcctagtattcttttctttttttcttcgaattcttcgtgggtcattaggccgtcgtcgcgcattttgaggtaagccatgataagatcaccggtcttaacataactgaggtcttcttcaacggttggtttttcgagatagtccgctaaggctgtgtataacttgcgcacagcgaggttatcgtcgggttcgaaactgatgacgattttttcgagggcgtggttgggtttttggtagagaatttggagatgaccatgccgataagtcgcttcaaaaaagcggactgattttaatttgctaaacggaatgtcacgatcctggttttgtttcttcttaaacagtccgggatagtgaattgttaggatattttcgtcataggttaattcgagtttttgaggttttttaatgagataagtttgcatcgcttgctcctttaatcattcttaagtaaaagcacggtagttcttaataaatgaagcctaaacttacctttatcatagtagacagtgaccctaaatagcaagctgttcgtattggtttatgaaatgaggtgggatgatgaaattttttatgggtattcgcaacggcctgttagtggcattaccgatttggtgtttaataatcttctcaattacgtattggttacgctaaaataaaaaaacgggcgccacacaaaaactgtgcagtgcccgttttttaacgtaaattggctgttttttaggtctaaagacggtttttatgctagtatgaatagattacaattagtgacattgattgcatctaggcgatgtaattattataatgaaatcaaatgtccaaagataaggaggaggaaaccaattgaatattgggatatttacggacacctactttccacaagtcagtggtgtggcaacctccattaaaacattaaaagaagccctagaaaaacaagggcattcggtctacatatttacaacgaccgatccacatgttgacaaagatgcagtcgaaccgaatattttccggtttgctagtgtcccgtttgtctcatttacggatcggcgaattgctgtgcgcggcttatttcacgcttatcaagtggctaaggaattggatctcgatatcgtgcatacccagaccgaattttcgatgggctacatcgggaagtttgtcgctaaaaatttaaaaattccttgtttacatacgtatcatacgatgtacgaggattatttacactatgttttaaacgggaagttattacggccataccatgttaagcaaatgacaaaggcctttttatatcacatgtcaggcatcgtggcaccatcagagcgggtttctcaaaccttaaatggctatcaagtgaaggcccccatccggattattccgaccggggtcgatattagtcgctttgagcgcgaagtgacccgcgacatacgggccgaattgggcttgacgccagaacaacctgtgctcttatcattgagtcgcgttgcttatgaaaaacggattgatatcttagttgatgcgttacccaaactagtcgcccaaacaccagatttaatgttagtgattgttggtgaaggtccagctcgagaagatttagaagctcaggttgccaagttaaacatgaccgaccacgtgattttcactggaatggttgataacgatgaagttgcaaattattatcatatggcgaatctttttgtctccgccagtgactctgaatcacaaggattaacttatattgaagcgatggccgctgaactcaagattgtcgtcatgacaagtccatatgcggctgagttattaactgatccttcaattgggacgacatttacgaacgaagatgaaatgatccatcaagtatcgaattatttgaatcatccacatgcatttgatgatccagcaccgcgccgaaagaagttgcatgctatttcggcggattactttgcggaacagatgattcatttctataagcaatcacagctattatatgacgaattaaagttagaccaagatgatttattggaattagaagatttagatactaaaaaataagtcgcgttggcggaaaactgttgatcatttaatcaacagttttttcatatcgttgctaataacaagaaaaagggtcgtttatgagtagaacgaataagattgtttttgcagtcatgctgttgattgggtgtgggatttttgcctatgaaagtcgcacgctggcgttgaaacagctgtttatcgatattagtcatctgaaactttggtggctgttggtcgccttattatgtatgttaatttcgtggtttttcgaggcacttgtcttacgcgtctttctaaaagaccgcacagaacacttttctttatacaatgcgcttcggattccgttgattgcacaactattcaatgcgattacaccgttttcttcaggtggacaaccggcacaactggtagcgttgatgcaatcccgtgtagaagctgggcaagctagctcagtactgctgatgaagtttattgtttaccaattcatggtactggtgaatttcttattaagtatgatgattggtttctcgcaagtttccaagcattttgggacgctgtcgattttgattactttcggattaatcgtgcatgtggttgtgttagccgtattgttgctaatcatgtattacaatcgatttacgaaacagttagtgcactggttattaattccggtgggctggttcgtctcccaaaaacgggtgacggaatggcggacaatgttaatggccaaaatcgataccttttacgcggagagtctacaccttaaacgcgagaaaaagaaactaatcaagggctgtattttaacccttgggcaactttttttctattatagtgtgccatactttgtcttattggcacttggcatcccgcatgttaattatttagaggtgatggtcttacacatcatgattgtcatgattgtctcgctctttccagttccaggcggttctggtggggcagaatatagttttaagacgttatttgccacttttatcccgagttcaagtaaactggtgttaggcatgttgctctggcgattgtttacgtactatctcgggatgttcatggggattggggcgttagcagttaaaccacgagtaactgataaaaagtaggaggcgtttttgatgcaaccaacaattggcttcattggaacaggtgtcatgggtagtagcatggtcaagaatttattgaaggcagactatccagttgtcgtgtataaccggacaaaacaaaaagcggatgcagttgtggcactcggtgcaacatgggctgattcaccagcagcggttgtcgcgcaaagtcagattgtgttatcaatcgtcggttatccgcaagatgtcgaagccatctattatggtgaagacggaatttttagtgctgcacaacctggtcagattttggtggatatgacgaccagcacgccaacattggcgcagagaattgccaaaacagcagctgacaaaggtctgcaagcattagatgcgcctgtttctggtggcgatatcggcgcccaaaacgggacgttgacgattatggtcggtggcgatcaagctgcctatgaaacggcattacccgtttttgaagcaatgggtaagactgtccatcgcttcggtgctgccgggacaggccaacatacaaagatggccaatcaaatcatgattgctggcacaatgaccggaatgacagagatgttagtgtatgctaaagcagccggattagaactagaagcggttttaaacacggttaatggtgggagtgctcagaactggagccttgcaaactatggtccacgtattctagcgcaagactatacaccaggctttttcgcaaaacattttttgaaggatttaaagattgcattaacggaatccgaaaagatggggctccatttaccagctacgcttcaagctaagaaactctatgcgcagctcgttaatgataaacaattaggcgacgatggcacccaagctttaattaaattatggtggccttctgcaaaataattggatataaacggtgcagaagtgctctttttctgataaactgatagttagttattaaaggaggcttcgccatgcaatcatcacagttagttgcgattatcaaacgtctggtagcaatgcaagaagatcaaagcgctgaggttcaagaaagacgttttgaaaaggacggcgatttaaaagcaactgttagctatgatcctcaagctcaagcatttgaacttgaagacagcaacacacatcaacaattccaatttgacaatattgatttagttgcaatggaactatacgatttattagcagactagttaattaaccattgagtatcgaattacttgatggtttttttgctacttaagcaggtgatagccttgctcagttgcgactcagattattaaaaatggtttaatatttggcattcaagccggttacatattgcttttcatttcacggatgtgtaaactaactttcagattgtcaacggcttttaaagcccaacgacctttaacggaggctactgtatcgatgaaacaaattggtcataaaattcaatcaggattaagcacacgatggggattcttccttttcgcagttgcgctattctggcttaaaacaatttacgcatatcaaacaaaatttaacttaggcgtcaaaggtggcatgcaggccttcttaatgacgattaatcccattccaacaaccttattgctatttgggattgccttgtttatgaatggccgaaagtcatacattacgttgattattattgatttaataacctcaacttggttattctcgaatattttgtattaccgtgaattttcagacttcttaacgtttaacttaatgaagggctctggtgcggtatcaaataacttgggcaagagtattgctgggattattgaatattctgatttcctagttttcgctgatgttttattgctaatcatcttattggctactaagttagtgaagattgatcaccgtgtctttatgaagcggaatgcatttgcaattactgggttagctgttgtgttattcggtgccaacctcgggattgcagaagcagatcgttctgggttattaacccggacgttcgataacaactacatcattaagtatcttgggatgaatgcatacactgtctatgatggcgtgaagacgaccaagaataatgcgattaaggctaatgctgatagtagtagtatgagcagtgtcttgaagtatatgaaggacaaccgggttgcacccaatgttgaatacactggcgtggctaagggtaagaacgtctttgttatccatttagagagtttccaacaatttttaattgattataagtgggacggtcaagaagtcacaccaaatatcaataagctatatcacgaccaaaacaccctcagtttcgacaatttctttaaccaagttggtcaaggtaagacggctgatgctgaattaatgctcgaaaactcattgttcgggttacctgaaggggccgccatggtcactcaagggacaaccaataccttccaagcagcaccatcaattctagatcaacaaggttacacaaccgcttcattccatggggatgtgccaagtttctggaatcgggataatacctacaagtcatggggctatgattacttcttcagttctcaatactttaaagaaggtaaaggctacaacgtgggttatggcttgaaagataagatcttcatgcaagactcagcccaatacattgaacaattaccacaaccgttctatgctaaattaatcaccgtgacaaatcactatccatacttattggataaacaaaatcaatcaattgctaagaccgatactggtgatgatacagttgatggttatgtgcaaaccgctaagtatttggatcaatcaattggtgaattcttagcttggttacaaaagactggcttagataagaatagtatgctcgttctatatggcgatcattatgggatttcagggaaccataagaaggctgttgcgaagttattgaatcaggataaatttactgattttgataatgcgcaattccaaaaagtaccgttcatggtgcatatggatgggttaaaaggtggcgttaaccatacctatggtggtgaaattgacgttttaccaaccttattgaacctattaggtgtaaaaaatgacgataccatccaatttggttcggatttacttgcgcctaaccgcaatcagacggttgtctttagaaatggggactttgtcacaccacagtatacgaaggtaggcagcacctattacgatacgactaatgggaagacgctgacgaatttaacggcagcgcagaagaagcaattaacggcaatcagtgaacatgtaacggaagaattgtcactttctgacaaggtaatcaccggcgatctacttcgattctatacaccacaaggattcgaaaaaccagataagtctaagattagctacaaggtgaaagatgctaaagctaagttgaaagacagtaacaataaaacgagtgttatccagcaaaataatggtaagtcaacaatggacctttatgaaacggatgcacctgaattgaagtaaagtatgtaaagacgttacgggactcgcgtaacgtctttttttgagcaaagatacttgtcagtctcgtcaaaaaaaggtacgattacagcaataaggatatatgataatgattatcattagcgaaaggtggtggcaaaatgagtcacatcgtgcaacaaacgctacggaaactcaaagaacacaacgtacggatcacgccacagcggcaagctgttttggaattcatgattggcactcatatgcatccgactgcagacgatgtctataaggcgctagcagggcgctttccgaatatgagtgttgcgacaatctataataacttgcgtctgtttacctcattagggattattgaagaaatggcttatggagatgcatccagtcattttgattttgcgcagaccaagcattatcacgctatttgtgagaactgtggaaaagtagttgatgttttttatccggagttagatgatgtagaagtgattgctgagaatctaacggggtttatggtaactgggcaccgaatggaagtgcatggtatctgtccagaatgccaagcaaagcttgcaaataactaagttgtttgaatatttaaaaaaaagatgaattttatgcaaattttacttgacgatggatttagatgttggtatagtattctatgttgtcagcgagagaaaagctcatcgctaacgaaataacgggtcaaacgggattgaataaatattcagaaaatatttataaaaatgtggacaaattgtccacaacggctttttacgttacatatgattgagtaaaacagttaaggctgcaaatgcgacacttgcaattgcgactaaaatgaattgatgctgtttcattttgagaattgcaatgaattcacggatgattgcatttggtaagaagtaacgcgatgttttagcgccaatgccatctgctttcaaacgggcttgctttgcaaaaagcccagcgcggaatgtgtggtaattattggttgcaaaaataattttaggattcgatttagtggtatcagccatgataatgtcttttgaaaattgcatgttttgtaaagtgttgactgatttttcctcggtgagggtgtctttaatcggaatcccttgctcaatggcgtaacgttgcatggcaactgattcaggcagcttctcatccggaccttggccgccagaaaagaccagttttggtgcagggcggccttttttgacttgtttatcataaaatcgaatggcgcgattaatccgactggccagtaacggtgggacgaattgaccatcgattaaaccgctacccaagacgatgatgtaatcttgttgataacgggggcggttgaattgatagataatcagtgaagttagatataaatagaagaacaatggaatatacaaaagaaaaaccgatacaattatgctgacaaataatttaacatcggcgggaatgtgtaacaagcgcgtgatgattgggatgaaaaatgagccaatgatggctaacgcaatgaggagggtcagcatgttggataacgtgtgactttcttttttccagacaatatacgcgttccacagcaacaagacaataccgaataagtagaagaacatgacgattagaacgacaacaatggcagcagcaattgcaatgttattcagcgtttcgttattgaggcgaatcacaatgagcgcagcatccattaatgcgctgaagaggaaaaagttaaacacaatgccgttgattaattggcgtttttcaaatcgctgtaaaccaatgaataaaatcaaaaagaaaaggggtgacgcgtaaacgagatcaattaacgtagtcataataactccccttatgattaggcttggctttcaaaggcgtatgtttcaatggcgtatgccacgccatcttggccttcatggttactcttagtaacaaccttagcaatttttttcaattcaggaatggcattatccatggcaactgggaagccggcgtattctagcattgatagatcgttaccttgatcaccaatggccattacttcagattgatcaatatttaaggcatttgctaaatcgcgcaaaccatttcctttaccggcgttcttgttgagtacttcgagaaagtaggcttcactttgaacaaattgataacgatcgaaaaaatcagcaggaatcttggttttggcttcagctaagacggcgggttcgtcgattaacatcacttttgaaaaggccttgttaggtgtgatttcatcgacatggcggaaacgaataggcatgttgacgagggcactttcaccgactgtgtaagggctgatatcgcgattggcggtgtagatgaattgatcatcttcagcgtgtaaatgagaaccgatttggcgggagagggtttcaagttcaagatattggtcatgcgtaagagtgtgacgcactagaatttcaccagttgccgtattttgaaccaaagcaccgttgaacgtaatcacatagtcagtggcttcagttaaacccagttcttttagaaaaggcgtgaccccggtgagtggtcgcccagtacatagcacaactttaacgctatgttttttagcagctttgacaactttgattgttttagggctaaggatgttattttcatttaatagggtaccgtccatatcgacagcgacaagtttgattgacattataaaaactcctttttagtggttaggattgattgcaccgttacgcaagtatgctttgaactggcggtatattggtgcgaagacttcgatatcattttcgttgagcatttctttagggaaatagaagcgttcatcgccgctaaaacggcctgagatggcggctaccaagtcacttaatgatgataactcttcaagttgaccatcagattgtataatttcaatctgagttttgggtgatttagcggagggatcataggcgtcatacggcaaatcgaaactgttattaacagcagtgtaatactcactgttataaccagcttgctcggttagcgcccgtaattctggtaaaacacattgggtctgttggctaaaggcaaccgatttgagtgggcggcggcttaaaaagcggtcggccaaatcattgagcactgaatccggatagtctaaccagtatagaaaataggtattcaaaacgccatcatctaattttaaatagtcttgtagggtgaagttctgttcgaaaaatggaatcaataattgcggtgcgagactctgatgatggtcaggctgttgataaagaactttcgcacgttgcaagagcttttgcaagacaacttccatgccgcgtgaaacaggatggaaataaacttgttgatacatctggaaccgactgacgatgtaatcttcaacggcatgcatcccgtttgctaaaaaggtaatgcccttatcgtaaggccgcatgactcgtaaaacacgcgtcaaatcgaattctccgtatttagtcccagtattgtaagcatcccgtaataagtaatccatgcgatcagcatcaatctggctggaaatcatctggacaacttgtggattcggataagaatgatcgattacactagcgactttcgcagggaaatcatccgcaacttgggttaagacgcgattaatggctgtctccgggttggtgataatttggcgcgtaatcaattcatgatcagtattgaagatgtgttcgaaggtatgtgaataagcgccatggccgatgtcgtgcaataaagccgcacataaggcgactaaccgttcatcatcgttccaaagtccatcaccggcaacttgactagggtagttaagttggaattgatcacagatttggcgtgtgatttcataaacacctaatgagtgggtgaagcgggaatgttcagcgccttggaaaacagaggaagtcgtgccaagctgtttaatccgccgaagacgttgaaattcgggggtgtcaattaaatcgagaatcacttgatactcgacgcgaatgtagttatgcacaggatcacggaatactttttcacgcgatagtttaatagcggtgttagtcacaatataatctcctttttgaggcccgttaaacttgataacggtggagtgctgtttggtttttaagtagaagttgttgataagctttcgtttgtaattgtggtgtgaggtcaactagttgtggttgttgaaccaaccggctaaaagcggtctgtaggtgcgtaatggctgttgcaacagtcattggtacgtttaacagatcagataggttggccatggtgtccgggatgaccgctgggaaagtccaccgcgtttggctttgtgcttggccagcagtgtaaaagctatgcatgagtttgccacgtgcctgttgattgcctgtaatgctggcgtataagagtacggtaattccgtttttggcacggcgttgggcaataccggcaaacttttgaccattgatgctgagatcgtattcgccagggcaataggagtgagtgacttcgaaatggtcaatcgtgacgggatagtctgcaaaggcagttgtgaacaattggtgcatgagcgcgtaagcggcattaatgcttaggtgatccgccatatcaggaagatagaagctgacgttcaaaacgccggcatccgtcacaatccccaaaccaccagcgttacgcacgaaatgggcatagtgtgcagcctctaatgtggcaaccgcttgtggataagcaggtaactttgtatccatcatgcccaaaataacattgtcagcaagcgtccaaaaatgaataataggttgttgtaattcgcggctcaaagctaagaggctattagcatgagcaaaagcgagtggtccagccgctttttcaaaatgttgggttaaaatagcccattcttgattggcagataaagtcgctaaatcatccatggtaatcacctccgaaaattaaaaactcttcttaattatagcgtaaattctaggcgctgtctgcaatcggtacgctggtcaaagagaattggcggattattctggcgctcaaattttgaatggcttataatggaactacttaattaaaattaaaggaagttatttatggcaagtcaaagcggaattccggtcaaggtacaccttgaaacgcaaattcaacaaaatgggcaacttgaaaaacacgttttcgatgaggatggtcaagttgtcaaaatgggagagtccctttacttacgttatctggaacacggtggtgaacaagccaccgcggtacggtttaaattggctgctgacggtcaaattcaattaacgcggggcacagaagaagacgagacgcaattgcggttgtactttaagcaaggtgaagacctcggatcaatttaccaaacaaaatatggcaacatgccagtgctcacaacgacaacccatttattatcgatggtgaaggaacaaccgttatcaggtgaaattacggttcattaccaacttgccatcaataatcaagccgtgggggattacaaattacgattgatttttacagcttaagctagtatgattaaggatagactgttgaaaggacgtgtactggttgaaattagacgtttttaaaggccaaaataaagaagaactatcaatgattgaagtcgcacatgcaattttagaagaaaaaggcgacacgattgcattcgctgacttaacgaatgaaattcaaaactatttaggcaaaagtgatgaagaagtgcgtgcacgcttatcacaattttatacggatttaaatgaagatggtagtttcatttctttaggcgaaaacgtttggggcctccgttcttggtacccatatgaatctgtcgatgaagaagttaaccatccagaagatgaagaagaccaaccaactaagaagaaacgtcgtaagaaggttaatgcattcttagcagatgttaccgacgatgacgatgtgattgattacagtgacgatgatccagaagacgaagacttagatgctgatgatggtgttgatttagcagctacagatgacgttgctggtgatgacttaactgaatacaaagctgacttacaaaacatcggtgacgatgacgatgatgaagacgacgatgccttagaagacggtatcgaaggtcaattatctgaatttagcgatgatgaagacgaagaagacgaagaagacgaagatgacgagctttaattagacgtttccgattcgttgccataaaaaaagacgccaaagttaactttggcgtcttttttttgcgtgtaatattttttaagctaatcctcgtcggatacccgatttacgacacactcttgttcaagaaaatggtaaaccgcgccgattaagttggcgtcttggttgaagtgacaaatttcaatgtgtggcacaggaattggggtgggtgcccctgcacggcgttgccagtaacgattaatactactattgtcatcggctaaaagtgcgtcaatcgcagcgtttaattttggtagtaggtcagttcgctgactaatgccaccaccgacaccaataatctcgggcgtgtaagcaacgtttaaaaagagcatgatttccgcaagggcagcatacatctgtgtgacttcttgggtggcaatcggatccccttgatcggcaagttcgaagacggttttgccatcgattgtattggggagtttaaaattacggagggagacagtcttgccaatttggacgggtgagacttttgaattgttgagtgttttaatggcatctgcgatgaatttttcgaagttatcgattttatcagcagtggttttgagaatggtcccattttcgataatggataagccaatcccagaaccaattattgtgaataaggcgctcagatgaccttgaccaatcccagctgtcatctcggcgagtgctgcactgtcggcatcattttggagagagacgggcagaccaaggcgcgttgcaaattcagtttgaaattcaccgaggtgcaaaaatggcacataactcatgccatggatgatgccagtctgttcatctggatcaccaggacaactcaccgcaattccagttaaatgaaagtcggtcgcaaattgatcacgtaattgttcaacttcggaatagaagcgattgcgtgttagcggtgtagggaattgcgcttggttaattagttggtgtttcgtccaaatcccatatttgacggcaaaaccgccgatatctagagctagtaacgcgtcttgtagcatggtgggccatcctttcaaagtaggtcatgcaaatagtgtagcataggcgatttaaaatcggcgcagaaatgactaatttttttgcttgacgctaattgccatttcttgtattatattctttgggcgctttgcagttactttaattgcgaagccagaatcggttaacaggctccctgttcattttgaatagggagcttgtttttgtttttggttgtttcccaaaagcatgaatgtttagcgtaatgctaagaagaaaaggagaatatttatatgaccaaatatgtttttgtaacaggtggcgttgtttcttcacttggtaaaggaattgttgcggcttcacttggtcgtttgttaaagaatcgtggattaaaggtaacgattcaaaaatttgatccatacatcaacgtggatcccggtacaatgagtccttaccaacatggtgaagttttcgtaacagatgatggtactgaaactgatttagatcttggccattacgaacgttttatcgataataatttaaataaatattctaacgtgacgacaggtaaaatttattcagaagttttacgtaaagaacgtaaaggtgaataccttggcgcaactgttcaagtcattccacacatcacaaacatgattaaagaaaaaatcatgcgtgctgctacaacgactgattcagatatcgtgattactgaaatcggtgggactgttggtgatattgaatcactaccattcttagaagcacttcgtcaaatgaaggcggatgttggcgcagaaaactgcatctacattcatacgacattggtcccttacttgaaggctgccggtgaaatgaagaccaaaccaacacaacacagtgttaaagaattacggagcatcgggattcaaccaaacgtcttggtttgtcggactgaaaaaccaattcctgatgacatgcggaacaagattgcccaattctgtgacgttgaaccagaagccgttgttgaatcacgcgatgctgaatcaatctacgatattccattgttattgaagaaccaaggcttagatgattttgtcttgaaccacttcaagatgacagcaccagaagctgacatgacagaatggattgatatgttacacacaatcaagaacctcgaaggtacgaagaagattgccttggttggtaaatatatcgaattgcaagatgcttacatttcagtgaacgaagcattacgacatgccggttatgcttataacaccgatgttaaagtgacaccaatccaatcagaagatattacgaaagaaaatgttgctgaaacattagctggctttgatgggattatcgtccctggtggtttcggtgatcgtggtttagaagggatgatcctttcaattcaatatgcgcgtgaaaatgatgtaccctatcttggtatttgtttagggatgcaaatggcaagtattgaatttgcccgcaacgttgctgggattacagatgccacaactggtgaagtgcacccagaagcaaaacataaattaatcgacatcatgtcagatcaaaaagatcttgaaaacatgggtgggacacaacgtcttggcttgtatccatgtaaattaaaaccaggtacaaagactgctgctgcttatgataaccaaagtgttatccaacaacgtcaccgtcaccgttatgaattcaataacgaataccgtgaattgttgacagacaaagggctagtctttgccgggacttcacctgacaaccgcttagtcgaagtcattgaaattccagaaaacaaattcttcgtggcagctcaatatcacccagaattcctatcacgcccaaacaaaccagaaggcttgttcaaggcatttattggcgcaacaatgtagagtgctgactcgaacgggttggctttgaggattaacaagaaaataaggattatggcgttctttagccataatccttatttttaggttaaccggaaaaggcagttcgaggaagcacgtttcataaaagacgctactagtcagcacgacaaagtagcgtctttttgtatgccgaaaaatagttgtgaaaatggagatggtccgttttgaaaagccttacatttttagacttcgatagcccaattgaatgcgatgattagcttttactaagtatgaaaattaaaaagtaaatgttatccctaaatgccttgtaatttatgtgctgattaattattattatacatgtatgactaattatcaacggcattgagtagattggagccgtttttcaattttaaaaaataaaactaaaaaattaaaaaacttaaaaatatcaaaagcgccttctggtttaaaccacaggagaagtgggaaactgaaggcggttcttttgttgcagagcgaacggggaaatctaaaaatgaaaaaaatgttaattcaaggtggcaatctcttatctggagaggtcacaattggcggtgcaaagaatagcacggttgcgattattcccgctgctattttggcggagtcgaaagtcgttttagactgtgtgccgcacattaaagacgtcaacagcctactatccattctagaagatatgtctgtctcatctacttttgctgatgacacggttgaaattgatccaacccacattatttcgacaccacttccaagcgggaagattcaaagtttacgcgcctcatattatttcatgggggctttattaggtcgttttggggaagcaatcgttgggttgccaggtggcgacgatattggtccacgaccaattgatcaacatattaaagggtttgaagcacttggtgcgacagtgactaataaccacggtgctatccaaattaaggcaccaaacggcttacacggtgctaaaatttatcttgatatggcatcagttggcgcaacgattaatttattattagccgctgtccgtgctgaaggacaaactgtcattgaaaatgcagcacgcgaacccgaaattgtggatatcgcgacattcttgaacaacatgggtgctaagatccgcggtgctgggactgacattatccgcattgatggggttgaacatctgtatgggcgcaatacacacaccattattcctgatcggattgaagcgggaacttatttaagtatggctgcagccatcggggatggcgtgaacgtcaagaacatcatcagtgaacacatggacgcttacctcgctaagttagaggaaatgggcgttaagatggatgttaaggaagatagtatcttcgtttatccatcacctaatttaaaaatggttcaaattaaaactatgccatatcctggctttgcaacggatttgcaacaaccactaacgccgctcttattaaaagcgcaaggtgaaggcattgtggttgataccctttatcctaaacgaacacgccacgtcccagaattaattcggatgggtgcagatatctcaatcgaaaatgatgtgattattttacatcatgccgacaagttacaaggtgccgaagtatccgccgatgaaattcggggcggtgcttgtttaatgatcgctggcttaatggccaatggtgtgacaacgattgataacgcaagtaatattttgcggggctatgaccgcgttgttgataaactaacgggtctgggcgcaatcgtcaaaatggttgaagaataagttaaccatctattgttttttgttagcattcatgctaatatttaatggttatgtaaacaaatatctctgacatagcaaatatctcagggcaagacttaagttgtgcatctgaattgatgcagataactttagcaaaaaggagcggaaaagacatgaaacaaggtattcatccagattatcacaaggtagtatttatggattcatcaactggcttcaagttcatctcaggttcaactgctaactcagctgaaactgttgaatgggaagacggtaacacatatccattaatccgtgttgaaatttcgtcagattcacatccattctacacaggtaaacaaaagtttactcaagcagatggtcgtgtcgatcgtttcaacaaaaaatatggttttgcagacaagaacgctgccaaataattattttgaaaccggggaatttttccctgtttttttttgcctttttttccataaaaatagccaattgcaaacggcaatcagctatttaatcaacattttttgaattcgatgactagcgagacacgctagcaaaatgactgggaaaaattgaatcgggaaaagaaagagtaacaaagtagcagtgacgtacggttgtgccacaatcaccgtacaactgacagcgacaaccgtggcaaccaggaggccgggagtgtatggcaacacaacggcgagacttaaaccgattgccgcacttgcaaaaatggctgggaaaattttaccgccccgccaaccaaaggcaaatagcagattggttagaacggtttttccaagtccgattaagagtaaataaatgaatgattgatctaaaccggatttggtaaaggtgaacaagtagtgttctccagaaaagagtaaataaggcgacaatagaccacaagcacccaagaacccaagaacacaccagcgatcattgcaagtaagaccggccgctgaatcgtatcaaagagccactggcaccattgttctatttttaagaatagattgccaaaaactcaaccgacaattaatgctaaaataagaagtggccaaaccattaatgtccaatgaatgattggtgtgtgcagtgtaaatggactttctttggggaagagttggttgaccaaggcgaaaccaagaatcccagtggcggttgtgagaatgtataatagaacttgattgaagtgtgatttgaaatgatcgcgcaaggaggtcgtctcaatcgcctcaccaacaccggctagtggtgcgtggaagatggccgctagcatggcaccaatccccatcgtcaaaaacgtttctttttgctgagcggttagtttaagtcgatcgcccaaccaagtgattaggccgccgacgttggtcgagagcgcggcttcagggccaaggctagcgccgcaggctaatacaactaaggcggcgataatgtttttaccgacttgctgttggtaggcaacggacccggtttgtttaaattcgctgagtgtttcatgcattgttttaggataaggcccccaataacgttgcattaagccgacgagtaatccgccaaatagaccaacaagcaacggataaaatggctggttgaaatgcgaataaccgacttgccaaattaagtgtgtactgaaattaatgagggctaaaaaggcggccgctatgccaccaatcaacaatcctaaaagtaagctatataaaacaaaaataattttaaactgcgtggttttagtggtaggtgatgacatagagcctcctagttaagggaattatttatgaactattatgcactacccacgctagtttgaccatagtcgaattgtgagggaaagaataatgaaaatcgatcgattacaagcatttagcgatggcgtttttgccattttattaacactattagtgttagactttaaagtgccggactatcaagcagggcatttgagtcaagcggtgattgcacagtggccaactttggctgcctatgtactatcctttttttatgtggggacattatggttgtttcatcacgattattttgcgaaaataaaacaagctaactggcagttaaacgtgatcaatctcagtattttatttgcagtgacactgattaattacccaactagtttgttgtcggaatcgattgctcaacaaaatggcgctgatattcgatttgcttttacatcgtatgcgattgttgcattagtcatctcagctttgttttgggtattatatcggtatatggcactgcatcatgaactaatgcgtcagtatgaacagcgacacgaggaattttatcaaacgattaaaaatgatcccttacgaagtgtcttgatttacgccattgccattgtcggaattcagattaatagctggctaggggcactgttgattttgctgggcaatatctttcatttcatcgcatacttgcgacttagtcggagtgtcacgctgtatcatttgaatggaaaggatgaataacatggcaaaacaaaaaacaaattggcggtgggtagattggctttatgtcttcaccattgtgagtcaattaatctatattggttattacttagaacaaatgctgactaaccccaaagacaacggaacattgtcttttgccgttttacaagtggttgcaggcctggtgattgcgaccttacctattatcattgaacgctttatgccataccggtttccagagattctatatgcagtttatttaatctttgtatactgttcgattttattggggacgggattacatttttatagtcgcttatactactgggataaattcttgcatgtcttgagtgccgggttattggcgggcttagggtatacggtctttaacgtattgatttcaaaacaactccgtcaaaccatttcagccttactcatgagtttgtttgcggccacgtttgggagtacgattggtgtgttgtgggaattctatgaatttaccggcgatagtttgttaggcttaaacatgcaacgttatatggcaaaaggtcaccttttattaggccaagcagccttgttagacacgatgggggacttactagcggatgtcttgggatcatgtttaatcgccattatcggctatttctgtattaaacataaccgggactggttagataaactgacgtttaccaaaaaatagagtgcgtttgtggcgcttatattttgagcattaactggatttgacgaattggcgattgtaatcaccgatttggcaaattctgttaagcgcagaaatatgccacaaaaagcacgtttcaacaaaaaagtggtgtcgctctgaaaatgagcgacaccacttttttgtattatttttgtatttcatgttcttcgcgtaagacttttgtattctgacgcacccagaagaggttgacgattactaaaacggttgtcgataggaaaaccccgctgtaaccgaataggccagaaacgctggaaccaattaaaggtccggcgacattccccattgcttggaaggattggttataactgaaaatccgcccggcggaactatggggtgagtacttcgcaagaatcgtttgaacttgcggtaacaatgcggcatcggcgaccccaaccagcagacgcagggcaccgagttgccaaacattttgaacgaaagcttgcggaacgtaaacgaagacggcgaagatcaagccaccgagtaaaattttctcggaaccgatccgatcgccaagtgcaccaaaacgcggcgcggcaattaaggttgcgatccctggagtagccgcgacaactccgctgactaacgctacgttattgccatgatgcattaattgacggacatataaactcaacagcgggctaattgagttgttggaggcttgaataatcattgtggtgacgaacatgccgataattaaatgcgggtatttcaattcatgaatcagttgccgaccgggtacttgatcgcctttttctactggcgtgaagtcttcgtgaacgaaaaccagacagaggataaagacgatgaacaagatggtaccggtaatgaagaaggttgttcgatagccggttgcttgggcgataatcccacccaacaacgggcctaataaggttccggaaacacttccggtggtcagggtgcctaaagcttgaccacttttttcttgtggtgctgaagtggcaattaaggcgtttgaattactgatataacccgagaagaagccttgtaatagtcgcaaaccaattaattcataaatattttggactaagcccatcgcacccaggacaatcgctagtcctaatgaggcgcggagtaacattaatttgcgaccacggcggtcagcaattttgccccaccatggtgaaatcagagcggtaaccaagaaggtaatagaataggtcaccccactccataaactcagttgggccgttgtaaagttgccaagtgtgtcaatgtataacgacataaatggcataatcaaactaaaagcaaccccggccatgaaattaccaaaccataaaacgacgaggttctgttcccattgtgcgcggcgtctgaataaacgttgacgaatgttagtcaacatggtgtcatcatctcgattctaaaaagttaaagcggcgaccacgcttgctgatgtgcgtggtaggcgtcttttaagtgtgggagttgttcaaagagggcagtcagttgcgcatctttagcgcgtggcagctggcgtttaaagtacaaccgctgagtgtcgtaggcagtcaatgcgcttgcttgttgggctggtgtaccgtgttcggcaaaatagagtagccaatcaaacagccattctttatcagcatcggcttcataacgggctagcaaagtgtctagctgtgctccctgtgccactaacaagtaatggttacgctgcaaaggggttaactcattatctggatttagatcaattactttgggacctaattgttcgagaaaactatccagcgaatcagcaacggttaaccattgatcgacctcagtatctatgtagcgaatcggtggttcagctgaggcttgttggcaatcaaatacaaagtactgctgttgatgctgactaaaagggactaagtaatcgggcaagtcgggggcttggatgactgcttcaccgttgtgagcaatcccagctaaataatgacactcaacgtcggcgagaccatcacttgttggctcactcgtaggaaggctaaagttagtcaaaaaaccgccattggttgtttgacaaagtgcctgataactcatgggaatccgagggtcatcgacaatcatccgtggtgcagttaaatcaacattcgcaattgctggctgtgcagtaaacatgcaagtatccctcccaaaattggtaactctttaattttaccatttatgtcaaaccaaggttttgttaaggttggcaacctattctttatttgttgtagcgagtctgataatatgaagacaacattaaagaaaagaggatacgcgtatgttgtggtttattattatcattattttgttagtggttggcgcggttggcttctatatcagcacctacaataacatggtcaagagtcggaactggacagatgaagcatggagccaaatcgatgtacaactcaaacggcggaatgacttgattccaaacttagtatcgaccgtgaaaggttatgctaagcatgaacaagacacgttggaaaaagtcatcaagatgcggaatcaattggttgaaatgccagctgataatcggcaagcaacaatggaggcttctaatcaattaacggattcattgaaaagcgttttcgccttgtcagaaagctatccagatttaaaagcggacgcagaatttacgaagttaatggaagaattgacgaatacggaaaataaaattgcgtatgcacgtcaattgtttaactcaagtgctacccgttacaacaaccaaattcaaactttccctggtaatattttggcaggtgctcacaatttccaaaagacagcttacttagaaacgccagttgaggaaaaagcagcacctaaagtttcctttgaatagggtgtgattgggaatgttatttgaacaaattcaacagaacaaacgtaaaacggtatatgtgatgattggcttttttgctttagtattggcaattggggctgcattagggtatctgtttatgcgtaatttgattagtggtgtcgtggtggcggctattttagccgccgtttatatggcgatgatgattggaaactcaaccaacgttgttatgcagatgaatcatgcgaccgaagtccatgatgctagcgaatatcctgatttatggcacattgttgaagacatggcgatggtcgcccaagtaccgataccccgggttttcattgttgacgatcctagcccaaacgcgtttgcaacaggcaatgatccacaacacgctgcggtggcggtcacgactggcatcatggcgcgtttgaatcgggaggaactcgagggggtaattgctcacgaagtctcccatattcgcaattacgatattcggttacaaacgattgccttggcactttctgcggtgatttcaatgctcgtgaacatcggcagcaacatgttatggtggggcggcggccgcagtcgtgataacgaccgtgaagaaggtgcaagtaatatcatcggtttggttttttcgatcctattgttgatattgggacctttggcggctagtattgcacagatggcgttgtcgcgaaatcgggaatacttggctgatgcatctggtgtcgaattaacgcggaacccacaaggtttgatcaatgcgttattaaagatttctgacagtgagccaatgcaagctgcggatccatcaagcgcagctttgtatatctcagatccatttaaaggacttagtcggtcgggtactcatttatttgatagtcatccaccgattgaagaacgagtcgctaaattaagagcgatgtaatgttttaaagacataacgcatcagctgtaggtaatagttgatagaacacgttttatatagagggaggcaaaattcatttttgtccctctctttttttgtataataaaggaaaagaggagtgatcagtgtgcgattatccccaatccagcagttaatggcgttacaatctactctaataatgcaattgaatgagacaccgagcaaacagattaccatgattgatttaccggttgtgcgtgggcaattattattggcattgcatgcgcgtcaccagctaacattatcgacgcaacaacgcacaatgattcaacgcgccatcatcacaacgctggcaactaaaacggatggcactcaattaatggatctttggcggcaaacactaccgcagcggtatcggattgttgatcaggcagaggtggtggcccattttgaacagttagaacgcgctaattgggacgttgcgagtttacgcgcttatgcaacccatttaacgggacaacttgctgcgcaaccaacagcgcttaaaaggattttgcaacacaattggcaagcattacatcaagtaggctcagcactttatcaaatgctttttgaagcatacggggaccgaactgcacaaccagtaattaattaccagcggatcaatttagtgctcacgcatttaggggcgcagttggatgagcatgcgtttttgcaattaacagcacgtgattatcaacttgacccgcaattagcaccagatgcgccttttttagcaacctttgcgcaaagtgtgcaacgtgcatttgtcggtcgagttttaaccgataaacggattcatcaattcagaatgtatttagatcggcagaatctacgctatatccgccattattttcaacactctggtgaaacagatgaacaagccttagcgcggtttgtgcgaaaacgacaagcgacccagccacattattggctgcggcgtgaaccagctcggctccataataaataccgcaacggacagcgcccaacaacgcattggaatcgaaaacgactcacgccggattttcatagtgaatttattctagcaccatctggagcatttatcagtcaatggcaagtgcttaaagtaaaggcggatggtctgattgatagtaatcctgaccattaccagctagatgatggcacactccggcaactactaaacggtgaatcgtttaattatgctaatcggaatgatcggcaacacgcccggttagatagccaaccaccgctgcaaaatgatcatgcactacgcaaaacagcttttaaagggtggcggagtccgactaagcaacaatatcgaccaaatgataaacaggttgatgactattcacggtggtactcttaattggtggtcaatcatttttggggcttttttgaaactatggtacaatattgcgtagtattttaagccataactaaaaaaagcgtgcgtaaaaatgcacacagagtaataggagttattgagatatgaaaatgcagttgggtgaaattgcacgagtcactggggctaaaaacgatattgaacaatgggcaaccattgaagtgacgaatgttgcgtttgacgcacgtcaattaaatgcgggcgctttgtttgtaccgttagctggtatgcgtgatggtcacgactttgttggacaagctaaggaaaatggggcagtggcaactttttgggctgccaatcatgatgcacagccaactgattttcctgtattagtggttacagacccactagcggcttatcagaagttagccatgcattatctccaaaaaattaatcccaaagtggttgcgattaccggtagtaatggtaaaacaacgacgaaagatatgacagctgctgttttaggtagtcagtacaatatgcacaagacacaagctaactttaataatgaaattggtgtgccacaaacgattttatcgatggaagctaatactgaaattttagtgattgagatggggatggatcgcccaggtcaattaaaagcgctcagtgaattagccatgccagatgtcgcagtcattacgatgatcggggaagcccatatcgaatttttcaagacgcgtgataagattgccgatgctaagatggaaatcacagatgggctcaaagaagatggtctattaatttacgctggcgacgaaccgctattgactgaacgggttggcgaactcacaaccgagacattcggtaatttgacgaccaatgacttatatcccttacaagtccgtgcaggtgaaactgaaacgtcattcaagttgaatgcttggccagagatgacgtttacgattccaatgatgggtgcttataatgtcaataatgcgttggccgcaattttggttgggcaacggttccatattaaaccagaattaatgaaaaaagccttggcgaattttgaagtcacaagtaatcggacagagtggcttgttggtcaaaagggtgaacggatgttgagtgatgtttacaattcaaacccaacggctgccaaagaagttttacacaatttcagccattttgagactgacgggcggcggattgccgtcttaggcgacatgttggaacttggtactgccagcaagaaattacacgaaagtttggcccaagaattagatcccacgatgattcaagaggtcttcttgttcggggatgaaattgaaccattatatgtgacgttaaaagagcgttatgcaccagaacgcctccattactttaaccgccatgaacaaacgcaattaattgctggcttgcaagcgcaggtacaacctgatgatttaatcgttttaaaggcaagtcatggcttacatttagaaaaagtagtcgctgctttacaagatactgaagttaattaatgattagcaattgacagacaactgcacaggcacgctgtttagcgattgaagctatggaattagattaacaattggagcaattccgtttgctaattaagttgtggcatgataagctattaaggagcttttttaatgaaaaaggcttttgaaaacaattatattacaagacagatttttgaaaatggtgcaattgacgaagtggacctgttttgtaatggcatgttttttacaaaacaaggaggaacactatttgaaattcgcagaattaggtttatcagaaccaattatgaaagccatcgaacgcgctggctttgaagaagcaacacccatccaaggcgaaacaatcccattggcattagctggtaaggatgttatcggtcaagcacaaactggtaccggtaagacagccgcttttggtttaccaatcttacaaaacttagacttagacaatcctaacattcaagcattgatcatttcaccaacgcgtgaattggcaatccaaacacaagaagaactctatcgcttaggtcgcgaccgtaaagcgaaagtacaagttgtatacggtggggctgacattcgtcgccaaatccgctcattaaaagatcacccacaaattcttgttgggacaccgggtcgtttattggatcatatcaaccgtcgcacagttaaattagaccacgtgaaaacattggtcttagatgaagctgacgaaatgttagacatgggcttcgttgatgatatcgaaagcatcatcaaacaagtgccagaccaacgtcaaacacttttattctcagcaacattaccagcaccaatcatgaaaatcggtaagagcttcatgactaaccctgaaatgatcaaagtaaagtcaaaagaattaacggctgacttaattgatcaatactatgtgcgggcaaaggacttcgaaaaattcgacattatgacgcgtttattcgatgttcaatcacctgaattaacattaatctttggtcggacaaaacggcgtgttgatgaattaacacgcggtttgaaggctcgtggttacaatgctgaagggattcacggtgatttatcacaacaaaaacggatgagcgtcttgaaatcatttaaggctggccgtttagatatcttagtggcaacagacgttgctgctcgtggtcttgatatctcaggtgtgacccatgtttataactacgatattcctcaagatcctgatagttatgttcaccggattggccggacaggtcgtgccggtaagtcaggcgtttcagttacttttgtaacaccaaacgaaatggaatacttacacatcatcgaaaacttaacgaagaaacggatgttaccattacaaccacctacagaaaaagaagccttcaagggccaattagctgcagcggttgcagacatcaactcaatgattgaaaaaggccaattggctaaattcagcgaagaagctgaagaattattgaaacaattctctgacgttgaattagcttcagtgcttttgaagacaatcagcaaggaatcagttcctgttaagataacaccagaacgtccattgccttcacgtaaaaaaggtggcaatcgtagcggcaaccggaatggcggcggcaatcgtcgtggcggtaacggtggcggctatcgcggtggcaatcgtcgtggtaatggcgatggcaaacgtcgtggtaatgacaacaaagacggtcgtcgcaacagtggcaacggcgatagcagcaaacgtcgtagcaatgacaatcgtgacaaccgtaagaagactgatggccgttcaaaacggaacttcacaattcgtacaaacgataaataagactttttaaaaacagcgggcggccaacttggtcggccgctgttttcatatagtcaattgtgacagagatgtaagttcagtctctgtcttttttgtggtaaactaattaaaaatagggtactaggggcgaagacgatgattgctggattaggcattgatttagccgaaattgatcgatttgaaaaagcacagagtaagaatagtcattttgctgaaaaagtattaacagctaaggaatatgaactgtttaaacggtatacggggcgccgtgcgttagaatttttagcggggcgctttgcagtgaaggaagcttttagtaaagcttatgggactggtattggacaggtacaactgcaagcgattgaaacgttaaatgatgcaaagggcaaaccctacatcaaacaagatttatttgagggaactgtccacgtatcactttcacatacaacgacgttagtgatggcagaagttattttggaaagaggttgagacgatgacagtcggctacttacgaccaacacgcattctagttgatcaaaacgcaatttatgaaaatattcaaaatgaactaaaggatttaaaaggcacagatgcagtgattttccctgtcttaaaagcaaatgcttatgggcatggcatgattcctgttgcagaagcggcccaagcggctggtgctgcaggattttgtgtggctattttagatgaggccttagctttacggcgtgctaactttacggaacccattttggtgctagggattacacagcccaccgaaatcgaattggtgattgccaaccaaatctccattacggtcggctcactcgaatggttgcaagctgcttacgaaattgcccaacaaataccttatccacaaccaatgcacattcatttgagtgtggatagtggtatggggcgaattggttttagaaatgcgactgaattactagcagcagccacatttatcaaagcacatgcgaaatattttgatttagaagggatttttacccatttcgcaactgcggatgatcccgatgatacttattttaaagaacaaagtgcccggtttaatgaactagtagccgtgttaccagaatgtccacgatttgtgcatgtttcgaattcagccacgagtttatggcactcagcttgcaatgagaatttaattcgaatgggaattagtatgtacggattgaatccttcagggaatgcgattcctgaattgccttatgcattgaaaccggcgctaagtcttgaatcagaattggtctttgttaagcaagttgaagccggaagtaagattggttacggtgcgacttatgaagcgagtgaatctgaatggattgggacgattccaatcggttacgccgatggttggtctagacggatgcaaggctcaaccgttttggtggatggacatcggtgtgaaattgtcggtcgggtctgcatggatcaattgatgattcggttacctaagcaatatccagtggggaccaaagtagtttttgttggtaaaagtggtgatgacgaaattactttacaagagatcgcagattatgcagggacgattcactatgaaattatctgtggtttatctgatcggttaccacgggtttacagtggaattgatgaacattaaggattgagaatttgattatcgccagttctgtggtaggatgaataaaggttaaagtgttgattcggaggttgatgcagatgaaagctaaccgtgaacaattatccgttaaattagacgttgagttggtccaagcaattaagcagtattgtgaggtgtatgcccttgatgagaatgatttgattcaagatgcgcttcacgaattcatggcgaccagacagtcaaaagtagataacgtcattaacgggtacgctgagatggctagcatcaacagtcaaattgcggctgaatttaacgcttgcgaaagtgaggcgtacgcacacattcgcgtagttgattgatcctaattggagggagaacaagtgggagaattaatacagcgtggcgatattttttatgcggatttatcaccagtggtcggttcagaacaagggggcatgcgtcctgttttaatcattcaaaatgatgtgggtaatcaccatagtccaaccgtaatcgttgccgcgattacagcaaagattcaaaaaccgaaattaccaacacacgttgggattacggccaaggataatggtgttgaacgcgactccgtgattttattagaacaggtacgaacgattgataaacaacgcttgaaagatcgcgtcacacatttagtggcggataagatggcacaagtcgatcgggcgctcaccattagtgttggacttaaagcggtcttaaatccttaatacataaataccaaaaagaaagaatgaagagaacccgcttataaaagcgggttctcttttttttgacctttatcaacagccggtaaatatgatatgatggtagctgttcgaaaaaacgtggttcgtaaccatcccacgcaaaaaaactaggaggattcaaagatgacgaatcaaagtcgattaaaaacggtgattctaaacgggttagtggcagcattatacgttgttttatcgttattcccaggtatgttgggatttgcttcaggagccattcaatttagaatttcggaaggcttaaaccatttagtggtcttcaataagaaatatctatggggtgttttcggtggggtattagtgttcaatttctttttcagttctgaaaacaagttactcgatacgctttttggtggcgggcaaactttattggcgctgcttgtattaacgcttgtgatgccctatttaaaacaaacttggcaaaaaatggtggtcaatattctcttgttcaccgtttcgatgtgtatgattgcgtggatgattgtgttaaccggttctactgctagcacacacattccattctggccaacgtatatttcgttggcactttcagaagcagtcatcatggtgattaccgcaccagtaatgtatgctgtggataaagttgtgcactttgatgcacaaatgaaatcataaagattaaaaagggcagtcctaattaggactgcccttttttgcgttaaactaaatcatcaagtttggagtcatcacggagcgccttatcagattgtaaatcatcgatttcaggaacacgatagccttttttctcgagcttataaacaatctttttcaaaatctcaagatcaagtccagcaggcaaggtgaaaagggtgcgtcgtacgaattcatcttgcttagcatctaaggtgatgcagctggcgattgaggtatatttagcgataatcttcgacatggcaaccaaatcaccttgttcaccagaagaaagcacagtgagtacatagctacttaattcgagattccacgcttcagaaagcatatttaataacgtgctatgcgtgagaattccgtaaaaattgctatcttcgtctaatacggcgatgtatggcaaatctttaatgttgaagaatactttgaaaaacggtgcgtcaactggaatatacttggtcatattcttcaataagctggtcacgggaagctgcatatcgcccccttgagacttatgacggtagatgtgcatcttatagatgttaccgcggaagatcttgccgctagcatctaggacgggcacacaacggtaaccagactcttctagtagctgtaatgcttcttctaaggtcaccgattcaacaattgtggtgagacgttctttaggtaaaactagggatttaatgagcataggctttctccttagattaaaattctctcatatactaatgtaatcatagcataccaccaagcagattaaaataactagtttttcgactcagcgaaaacttgattagtaatcgatgagaaagaacgtgaaatctaagcaataaaaaagcagggataaaagttaattttattcctactttgtatttaatcgttgagcttactttttctaaacgaattctgtaggtcagctacctctggttaatccgtagaggagaggtgttgctagtacactacgtctaaatcactacaactggaatgccttcgctaacagtatcgtagagtttagccattgtgccaggtggggtattgatacagccgtgtgagccgtgttctttataccagtcaccaccgtacttaggttgccatggcgaatcatgaatcccaacgccagtttcatcgattggcatccagtaattaactgggcttgcgtattcgctgaccccatcaaagttcttccccttcaatgtggcattgcgttctttcttccaaacgctccaaacaccggttggggtgacttgtggtggacgtgctgaaacgatatcagtgtcaattgtgaccttaccatcttgataaagccacatatgttgggcttttaaatcaatttcgatgtaggttgaaccgacactacgcgttttctgatcagttccggaaccacggataacagctgttcttgagaaatctttgcccttaggcacttctgtcattaaggcgtggatttcatcggcaggagagatactccacccataaattccagctgggacagtgactgtgccttcttttgtagaattgaaggtcaaatctttgtcaaaagtatcatactttgcctttaattgataaacgtatttggtaacggcagctttatctagactaatggtaccgttgttatacgttaaccaactttggatgtcttctttaggaacttggaaatcattaccattaactgaatagctgattttttcattagcaatcgtcttcaattgatcggcagtttttttcaattgcttgtccgtagatttcacttcaggttgcgcataatcgttttttaagtcgattgttgcttgaccttggttaataccgtgggcaactgcttttttgaacttagcggcatcaattgtgttcccgtagacttcttttacgagatcgaactgatgattctcgaggttaatatgggcattctctgaaggtttgcgatcagcgttgaccttttcgagggtttccgttgagaatttgtcaaaatcagcggcatttaaaatgagtgcgtcttctgatttagttgtttgttcactggcaaaaacgtggcctagccaagaccaaccgttttggctttttttaatcttttccaataacggtttaaaattatggctaaagccagcttcttgaccgctaaaagttagcaatgtttgattgttatcctttagcgtatatttttgacgattcactttttttaagagttctgtgttagcgtctgcgactgattggccactaatgttgacaccggcaacggtcgtatgtggcaagaatgctttttgataatgaagactgactgccgagtaacctccaacaaggataacggctgctacgccaagggcgacgtaggctttcttcgtaagtttcacaacctcaactccaatctctgcataggttaatcataccccagtatcacataaaatacaaaggcgttaactaatagttagcatacaagatatgcacccaaaaagaaataaaaggtagattgaactccgtcgctcattcacgaaactaggctagtcctcaaagtataaccggcttgaacgcacttctatttttaacgtgctttcaaaagcatcctattccggttagctacacaagtcaaacgattgcttacagcaatcattcgccctgttaggctaatcctcacaggataaccacttttgacgcacttctattttttgtgtttcttgttcagaatcttgtcgaacaagttgttgtcttgtgggttaagtgagtcaccacttgcgactgcaaatgcttttagcgcatcacgttgtttactgttgagggtctttggtgtcacgatgttaactgtaacgttttgatccccattacctgtaccgtggagcttaggcgcacccttaccacgtagacggaagacagtattcgtttgagtccccgctggcacttttagtttaacaggaccatggactgtgttgacttcaatttcatcccctaaagcagcttggacaaagctaattgggacttctgaataaatttgtgcgccatcgcgcttgaattcagcacttggtgccacgcggaagacgatgaataaatcgccataagggccaccgtttgtgccggcttcaccttggccttgaagacgcatttgttgaccatcttcaacacctgctggcactttaaccttaacagtatgccgttcatcttcgtgacctgttccatgacatgtttcacacttgtctttaatttctttaccagtcccgccacagacatcacagacttcttgagccatcatgcggccgaaagctgtttgtcgttcaacttggacttgacctgcaccgtgacatttgtgacacgtttgggcgcttgttcctggtttagcaccagagccatgacacgtgtgacattctgattcacggttataagaaatcttggtttctttgccgaaaatggcttcatcgaacttcaaatccatccgatattgtaaatctgaaccttgacgaggagcgtttggttgttgccgagcaccgccgccaccgaagaatgaactaaagatatcttcgaaaccgccgaagccttcagcaccaccaaagccgccaccgaagccttggcctgcgccgccgccgaaaccaccgttcataccagcatgaccgtattggtcataagctgcccgtttttgtgggtcacttaatgcttcatacgcttctgtgacttccttgaacttggcttctgcatctggggctttgttaatatctggatggtacttctttgaaagtttacgataggcctttttaatctcatcatctgaggcgtctttacttatccctaagacgtcatagtaatctcttttatcagccattgtgggcctccattcatatacttacgcgttaaatctatcttatcaaggatagcataattgactgattaaaaaaagccaaggccctagaccatactaggttttggctttttttaaaacgcattattatttgtcgtctttaacttcttcgaagtcgccgtcaacagtaccatcgtcagacttaccgtcagttgcattaccttcagcaccagcagcttgttgtgcttcttgcgcttgttgatataacttaactgttaattcttgaacgatttcactcaacgcatcgcgttttgtcttcatgtcttcaaagttgttttcttgttgtgctttgactaattcttctttagcatctttagccttttgtaattcttcgtcagaaactttaccttcaagttctttcaaagtcttatctgtttggaagattaattgatcaacatcgttcttcaaatcaacttcttctttacgtttgttgtcggcttcttcattttcttgagcttctttcatcatgcgatcgatttcttcgtctgataaaccagagttactcttgatagtgattttttgttctttatttgtgccaaggtctttagcagaaacattaacaatcccgttcttatcaatatcgaatttaacttcgatttgtggcacaccacgaggtgcagcaggaatatctgttaattggaaacgacctaaagtcttgttatcagcagccattggacgttcaccttgtaagacatggatgtctacggcaggttggttgtcggcagctgttgagaatgtttgggctttgcttgtaggaattgttgtgttccggtcgattaacttcgtgaagacaccgcccattgtttcaatccctaatgataatggtgtcacatcaagtaaaacaacgtctttaacgtcacctgagataacaccaccttgaacagcagcaccaagagcaacagcttcgtcagggttgattgagtgatcaggttccttgcctgtccagttcttaacagcttcttgaacagcaggaattcgtgttgaaccaccgtttaagatgactttgtcgatgtcgcctgattctagaccagcatctttcaaagcattcataacaggtgcttttgtccggtcaactaagtctgatgttaacttatcgaattcagcacgtgataaagtcatttccaaatgtaaaggaccgttttcgccggctgagataaatggcaagctgatttgggtgcttgtcacaccagataaatcttttttagctttttcagcagcatcttttagacgttgcatagccatcttgtcttttgacaagtcgataccgttgtctgatttgaagttttcaactaaccagttcatgatggcttcatcaaagtcatccccacctaaatgtgtatcaccgtttgttgataatacttggaagacaccgtcgcctaattcaagaacagaaacgtcgaaagtcccaccaccaaggtcataaactaagactttttcgtctgtttctgtcttgtccaaaccgtaagctaatgctgaagctgttggttcgttgataatccgtttaacatctaagccggcaatcttaccagcatctttagtggcttggcgttgtgaatcattgaagtaagcaggtactgtgataacagcttctgtgacttcttcaccaagataatcttcagcgaatttcttgatgtattgtaagatcattgctgaaacttcttgtggtgtatatgatttatcgccaacagttactttgtaacctgcttcgccgatgtgacgtttgattgatgcgattgtatcagggttagtgattgcttggcgttttgccacttcaccaacttggatttcgccgtttttaaatgacacaacagatggtgttgtccgtgcgccttctggatttgtgataatttttggttgtccgccttctaatacggcaacagctgagttggttgtccctaagtcaataccgattactttactcataaaaaataccctctttttttagatttttagtttaatttattgtgcaacaacgaccattgctggtcttaagacgcggtccttcaagtagtagcctttttggaagacttgtacaacagtatccactttttgatcaccatcaacagcgaccgtttgcacggcctgatgaatggtcggatcaaaggcttgtccttgcgcctcaatttccttaacgccatgatcttctaaagcatgtttcatatgatcgtatgtcatttgaacaccctttttaagactctcagcactatcatcagttgcttcagttgccaacgcacgttctagattatccaaaacgggtaagacatcttttgcaagtgattgcccatcatattttaacaagctagcttgttctttttgatgacgggtttgaatgtttttaatttcagcttgtgaccgtaagaaactatcttctaaatcatcatatttcttttggagttcagcaagttgagccgctaaatctggcttagctgcatcttcgtcaggtgcagcatcttcgatcacttcatctgcttctaattcaggttcaaatggcgtttcttctttaggtgtttctgtttctggcatttctgctactggcttttcttgtttctcagccttttcttgcttggtcaaacaaacacgctccttttaagattgatcatcatcgaaattcgcataataatcaattaatttcttcgctaactcttcacggaataaatcgagtaacccaatcatccgcgaatagggcatgctagtggggcccagtagtgcaatgactccctgtccgtgttcaccaacgtcataattaacagtcattagactataatgtttcaacagatcgttggccatctcggtgcccaggcgaacctgaacttggctattggcgcctccaggggacaaatctagcaacttggctaaatcatctgaacgattaatcatgttatacaacgacttcagctgggtgacatcggagaactctgaaaaattcaacaagttcatctgaccgccaacaaataagcgctcttgactcgcctttttcaaaacatcgtcgaagatgtctaaaaagccggtcggagaagccatgtactgggctaatagcgccggtacatccgtctttaacttctgactaaccacggttaacggtaagccaattaggtgatcattaatgattcgaatggctttttcgagttcatcacccgaaatcgcttgtggaatggtaaatacctgattatcaactgtccctgcactcgtcacgataatcgccatcacttggtgattactcaacggtactagacgaaaaccagttaaccgaatctcagccacttccggtcctaacgcgattgctgtatagctcgttaggttcgataagatattagccgattgtgagacgatttcatcaatcttatgatagtgctgtccaaatgattgttggaccgttgccacatcaaccggattgagggttgctggttgcatgagatggtctagatagtagcgatagccttgcatcgacggtacccgtccagatgacgaatgcgtcttctcaattaaaccgacactttccaaatcagccatatcattacgaattgttgcagaactaacgtgtaccggcaattctgccattaacttcttagaacccactggctgaccactctctgtaaaaagacgaataatttctttcaaaatcattaattgcctttcggtcagcatgtcatcacctctttttagcacttgaatatcatgagtgctaattacaattattaatatagcaagaacgtcaaataaagtcaagaaacgtaccggcttttttacggatttactgaaaatcggtccttagacggagggccttactggaccaaaggacaaaataaaaaacgagccgcttcttagatggaagagactcgctttatgaagtggaatatttataacgtgcttttcaaaccatattcctgtgcctagcgacacaaggcgaatgctcagaatatcccccggtttgaacgcactcaataactatctagcagaaactcttggaagacttcattgcctaagaacttacctgattcagttagtcttaaccaatcgccttcttgtttgaggtagccctttgcaatttgggtggcaactgtttcgccgtaaacattttgtaatggataattgaatttatcttgaaaatgactgatggatacgccttgcatcgtccgtaacccgaggaagagttcttcctccatttgttcggtcagtggcagaacatggcgttcaatgactggcaccttattttcttttaagggttctaggtattgttggattgggccgaagttatggtaacgatccttacctaaatagccgtaagcaccggcaccaaagccaaaatacttttcattgcgccagtaagttagattatgcgcagattgaaagcctggcttggcaaaattactgatttcatattgatctaagccagcccgcttgaaactatcaatcgcggcttgatacatatgtgcttcaacatcttgcgatggtaaatgcaacttgccttggcgcatcaagttatagaagattgttttgcgttcgagaatcaatgagtacgtcgaataatgcggtaagtcgagttcaattgccttattcaaactatccatgaaatccgcttcactttgttgtggtaagcggaaaatcaaatcgatactcatattttcgaagccgaccttgcgcgcgttatcgattgcccgataaacatccgcacttcggtgaatccgcccgatctgttttaaaatctgatcattaaacgactgcacgccaatacttaaccggttgacgccgttgtccttcagaacttgcaatttttcagtatcttgtaagtcattaggattggcttcaaacgtaaactcaccaccctcataaggtaagtattgatgaatcccatcggttaaacgttggagttgtgctggtgataaagtagttggtgtccccccaccgacatagatcgtatcaattggttcgtctgggtattctgccatcactaattgaaactcgcgaatcaacatatcgacataatcatcgaccggttgaccttcaatgaaaaccttattgaaatcgcagtagtaacaaatatgctcgcaaaatgggatgtgaatataagcgcctgccattaatgttgtgcctctaatttctcaaaataagttcgggtatcggcttcgtcttggtggagttggtcaatcaaggcttccgcggagtcaaacttcacttcgccgcgtaagtagtgataccaatccactttcacttgttcaccgtaaatatcgccattgaaatctaataagttaatctccaccgttaccgggttattgctgtggaacgtcacattccgaccaattgaagccatgccaatataccattgaccgcgcactaaaaagcggaccgcataaatcccaattcctggtaatcgttctggtcgttgcgattcgatgttagcagttggaaaccctaattctcgcccgcgtgcttcaccatgcactacttcaccggtcgtttggtaaacataaccgagtaattcattagcttccgcaatcttaccagcatctaaatcctctcgtactaatgtcgagccgattttgacaccattatggtcatgttctgcaactgtcacaatggcaaagcgccctttggcatagtctgacaatgtcgtcatattcgcaatctcttttttaccataagtgtaatcaaagccagccaccactgtatccgcatgtaaagcgactaagtattgatcgacaaatgtttgtggggctagttgtgcaaatgcttcattaaagtgcacgatgtagaaaacatcaacgcctaactccgccatcaattcttgcttgcgctcaaccgttgataaataacggaatgactcccgatcggcattgcgataaacaatggcaggatggatatcaaacgtcatcacagctaatagtaaacctttttgaactgcaatttgttttgctttccgaattacagcttgatggcctcgatgtacgccatcaaaaaagccaagcgccaagaccacttggtcagctggcacttgttcttttgaatatggatgaattaattcaatgacacgcatatttttcacctagttttttttaatgagtcccttgattttgtaaatacattttataagggcgataaagatgttgcgctgctttttcaacttgatagagcgccttgatatgcccttgataggtcaacgccacaatctcatcggtttgttctggcaatgtcaagaacacaccgtttaaaagcttggcccattgatcgtcgtctaaagcaatcttcttgtaatcttcaaatacatggtcaattggcaataaaacgtctgccagttcgcccgcttcagctttttgcgccaattgttccaacgtgatacagttaccaatttgaatgccgccactcttaagacgtgtcaaatcggacatcactgcgggtaaaccgagtttacgaccgaaatcaacagctaatgtgcggatataagtcccctttgagcaaccgacaatgaaccggaatgtttggcgcccagattctgcgtcaaattgtggttcaccatccaaatcaaactgcgtaatcgtgattgaacgttgtggccgttcgactggatcaccagcgcgcgcatagtcgtataaacgccgcccattgactttcaccgctgaaaacatggggggaatctgaattgaatcgcccagaaaactagcgagggtctctttgattctctcagttgaaaaaggttctgttaagcgcgcctcttcaacgacttcaccatctaagtcttcagtcgttgttgataagccaagggtgatttcacccgtgtagactttaccagaatgcaccaattgatcaacaaccttcgttgcttgaccgatacagattggtaacaccccatcgacgttgggatccaacgtgccagaatggcccactttcttcatgtgtaaaatgcggcgcactttaaacacacaatcgttactcgtcatgccgcgttctttatataagggtacaatgccgtccataagtaatctcctttaagtattaactaaactattatagcatagagtgtgaagtcgaacgggattagctttatgatgctgctcaatttattatcaaagcacaaaaaaagatgggacaaaagaaactcttgcccatcctcgctcaatgttgttttattagtaaccttttttactcagaaaaagtgagtcctttattttgaaaccgactatcgatcctagcactttttaattcgatcgcaaaaataatctctttttcctgttcttctttggataaactctcaacatagcctggtacttgtttttgataggcctctgctatatcactaaaacgatactgagttcggtataccttgagccggttactcgtgattcacaattcttcactagtcggtagcgtaaaaattgcggctcgccccaaatcgagttcactgacattcggtatcccatcaagcgtgacaaaattaatctgtcgactagccggttgtcccagttcgttcgctgtactcagcaccattgtattaaactgcttaacatatttacgaaactcgcttaagttattttgatacagctctaaactaaccggctgactatcaatataagcaatcgcatcatcaatcgtttctagtgccggattagcctctaaataataaagaatctgtggaataatgtgggatatttctcgttgataataataaaactgcaaccagcgattagatactgataaggcctctgtataacgcttaacaattcgccgccgatagcgttggacgatatattttaacggtcgatatttaatcaacttttgaaagagcgctaaactcaatagaaagattaaaattgcaactaaaatattgattttaacaatcccccatcatcggccagtgttcatactgcataaaaacattatacagtatcgtcaaaaaaggcgtgaccaccgccgcacaggcaattactaatcgccgtttaaaaacgcggcgtttatgggtcatatcttcgattattttttggcgttctttcatggtccgctcacgagtaatcatctcatcaatcaccacttgatctgcttcagaaatcatcggcaccctcctcaaaagcatcaaagcgttggcgtaattcatacgtccccacatcagcaaaatcagaaataatgatattttgtcgctgttttcgcatgtctgctgcaccatatttagcggtatacatctcctcagcccaagcgagacgtttctgtaaccgctgttcatcaaatgttttaacgacgccttttctaatccgatgttgtttcactttattcattaaataaagactgataaagaacgctgcaaaagcaatgatgtagagcaagaaaacataattggttcgttgcaatagttgtttaaaagctacgcgattaatcggaatgcgcgtttcacgagttagatagagcgcaattgtactcgaggttggcacaaggcacattaaccagccaatcccaattaacactgattgacgcaaatgatgccctgctttttgagtggtaaaaaaccaatcaattgtaatctgatcttcgcttagctggtgacgaatataatctggtttactcatttgaatccttcccttctggttttccagtgagttcagtcgaccgttttggtgatttccatacacccgcatctttacctcgaatgatttggcgaatcgttggcacaatttcgactgctacggtatacgtattaaccatccaataaatcaagatataccaaggcgcaaaggcgatatacttcaacgaacggccgccatcgttaaagtaagacgcttgtaccagctgaatcaaccctaccaatatctcgattgtgatgaaaatccctgaaaatgacagatttgagagtagccgatgccaatcatgattaatcagataacccatttgaagcactacaaaggtcaccatactcatccagtaaaataacgaccaaataatactcaaaccataatcgataatacttggcaccatcgaaaagtgcttaatcgggtgccgtaaaatgctaaacgattttgttaagagcacgtaaatcccaccgaaagtccatcttcgccgttgcttaacgagttctggtaatgtttctggcacatccataaaaaagcgaatgtgcggtgcaaaatatgcttgccaccctgcagtctgcatatcccaagaaatcgcaatatcttcagttggttgttctgcctgccaaccaccgacatcgatcaccgctgccttgcggtacatcgtattcgctccagaaaaggcaaacagcccaccgtaagaaagttgcgaccgtttaattaagccaataattgaatttaattcattttgttgagcttctgcgactagcgttgtcttattaatcgacaacatattaccagtcacggcgcctaattgagcgcccccttcccgctcaagataatacatatacttccataaggcatccacttcgggtttcgaatcagcatcgttggacagaataaattcacctttagcaaatcctaaagcactattaaaacccgccgcttttccgcgatgattaataatcgtgagcgttcgcaagtgctgcccatattttgcttgtaattcttctaaaataatgccagttctatctgtcgagccgtcattaacgacaatgatttcgtagcggtcagttggataattcatttgtgtcgctaaatgatcaatcgtcgcctgaattgacgcctcttcattgtgggctggcactaaaatcgtaataaatggcgtcccctttttaagatagcgtggttgatcagccttttccatcaataaccaataatataaactagagacaataaacgataagcccccaataatcggatacgaaacgagcgtatagattaatatttgagttaaagagtctgtcaacaacatgtacgcgccctcatttcagattggattttaatcagttaacaatgaattcacatcatataactcacttgccgcgctaaaccataaaatatctgccaataacaatagtttcattacttcaatagtaatatggtacaaacgactaagtcaatttaatagattatcgtttccataaggtcattcaaacaaaaaaagagccccgctttcgcggggctctttttcacagtttaacgctgtgcttcatcttcgtgtaacttacgtaaaagttcgtcgatatgttcaccataacgcactgaaccgtcttgttcaaaggtgatttctggaatcttgtacaacttaatccgttggccaagttcgctgcgaatcaatcctttagctttatctaagccagcttgtgtcttttcagcgtcacttgctaagccagataaaatgctgtaataaactttaacatgttgtaagtcaccactgagattaatatcagtgattgtgaccccttcaactcggggatcacgcactctttttaataaaatgtcatttatttcgcgttgaatttcttgttcaacccgaccaacacgatgtttcattgcttgtcctcctgtaaattaattatttaacaggtacttcttccatcacgtaggcttcaatttgatcatcaatcttaatatcattgtaatcttcgattgtcacaccacattcaaagccagttttgacttctttaacgtcatctttgaaacgtttcaagcttgaaagtttaccttcataaatcacgataccgtcacgaattaagcggacaccactatcacgttggataacgccagtgtcaacgatacaaccggcaattgtcccgatcttagaaacattgtatgtttcacgaacagttaattgacccgttactttttcttcgtaaactggttctaacatacccttcatagcagcttcgatttcttcgattgccttgtagatgattcggtgtaaacgaatatcaacttgttcagcatcggcttgaatcttagcttgtggtgttgggcgaacattgaacccgatgatgatggcgttacttgcagcagctaatgtgacgtcactttcgttaatcgcaccaacggcttcatgaataatattcacgcgcacgccttcgacttcaatcttccgtaaactaccagccaaggcttctgttgaaccttgtacgtcggctttgataataacgccaacttcttttaattcgccttgtttcatagtttcgaacaagttatctaatgtgacagggtttgaacggctacgttccttcaagagcgcacgtttggcacgttcttcaccagcagcacgagctgttttttcgtcttcaaagacaacaaaacggtcagctgcttgtggcacatcatttaacccagtaatttcaactggttctgatgggaagacttccttcacacgacgaccgcgatcatttgtcatgacacggacacgaccaaaggtattcccaacaacgattggatcaccaatcttcaatgtcccttgttggatcaagagtgatgcaacaggtcctttacccttatcaagacgggcttcgataactgtcccaactgctttttgatctgggttagccttcaattcaagcacgtcggcttcaagaagcaccatttcaagtaattcatcaatgttttcaccagtcttagctgagatcttaacaaagatggtatcgccaccccagtcttcaggaacaaggccgtaacccatcaattgttccatgacgtgatctgggtttgcgcctggtttatcaatcttattcaccgcaacgatgattggggctttagcagccttggcatggttgatggcttcgattgtttgtggcatcacaccgtcatcagcagcaacaactaagatgatgatatcagtgatatcagcaccacgcgcacgcatgttactgaaggccgcatgtccaggtgtatccaagaatgtgattaaacgatcgtttaacttcgtttgataagcaccgatatgttgcgtaatcccaccggcttcaccatcagtcacgtgactgttacgtaagttatccaataaggttgtcttaccatgatcaacgtgacccatgattgtgacaactggtggacggctcacaaggttggcatcactcttagcttctgtttcaaatactgaatcgatatcagcaatatccacttccactttttgttctgcttcaatgccgtaatccgttgctaataattcgattgtatccttatcaagtgattggttcatgttaaccataatccctaacatgaataacttcttgatgatttcagctggttcgcggtgaatcttcttagcgatgtccgcaacgttcatgccttcagagtaaaccaatacttctggtaatggccgttctttacgttgtggcatttccttcttagctgcattttgttcagctaattgttgcttacgggtcttcttgcgtttcttattgaaacgttgttgattgttaccgtagctgttatacccgccgccacgtttcttatctggaccaaagttctttggcttgcttgctgtattgtttgatgctggtttagcagcactcaccgtattagcttgcattttttgttgcatttcttgtgccgaaactggccgactttggttcgagttgttattaggacggccgttgttgttgctgtttgcaggacgattatttgtcgtcgttgggcgtgcgccggctggcttgttgccggctggacgactgctgttattaccgtttggtttagcagctggccgtgggcggttactttgttgacggcgtttcttttcgtctgcttcgcgttgttcacgttgttgttgaatgcgttcttgcgttctttgacgacgtgcattagcttgtgagatttgttcttgcaagctcaatggttggtttgacccagctggacgcgtattgccgtttgtccggttagccgcattattgttagggcgaccattattaggacgagcgttattgttgttaggacgaccattggcattgttgcggttttgaccatttgctgcttggccattccggttgccttgtgggcgttggttgtttgaacgaggtgctggtttgctgctagcttctggacgacgacggatagcggctttgttaatcttaatcttaccgttatctgttttttcgcttgcctttggtgcagcaggtgctgcggctggcttgctgtcagttgtcgttgcagctggttttgtttccttatggaagatggctctcaaagctttttcttgattgtcatcgatagttgccatgtgattttttagatcgtaaccttttttaacggcagtttctaaaagatctttgctggcaacgttaatttcttttgctaattcatagatacgttttttacccatatcttcacgctcctttattatcccagtagcgttatcatctttttggcaaacccggcatcaacaaccgcgatggtggctctatgtaatccaattgcttgggttagctgggccgcggtatacgcttttgtttccgggatttcgtagaaatgactcttatcagtcaatttcttctgtgtcagttggctaatgtctgagccgataaaaaccaatttcgctttttgctgctgaatggcttttaggacttgttcttcaccactgaccagttgccgtgctctcatgcaaatacctaagagttgtaataaacggtctggttgttcactcattttcgttctccaaataattctagccgagccttttgatgatcaacatattcgaataattctgtataaaatgattctgcaacgtcaatcccaaacgtcttttctaaaattttcttgctttgggcggtcttgattgcatcaggttctagtgaaacataagcgccacgacctgatttcttaccagttgggtcaatactaatctcaccttcggcagtctttacaatccgcaccatttcttttttaggcttcatttcttgcgaaataacgtcttttctcattggtacttttctttgtttcatcatgaacacctcacttattcttgtggttgttcttcagaatcaacagcagaatccgttgcttggtcttcgaagccttcaacagcttctgttgtttcttcttcaaaaccttcaacgactgcaccttcatcttgactgtcgtcttcatcaacgaattcgacttcagattcaggtttgatgtcaatcttgtagcccgttagcttcgcagctaaccgtgcattttgaccttttttaccaattgccaatgacaattgataatcagggacgatgactgtacatgtatgttcgttatcaccgttaaattgaacagcgatgacttcggcaggattcaaggcattggcgatgtagtctgaaggatcttcttcccacttcacaatgtccatgttttcgccgtgtaattcattaacaactagttgaacccgttgtcccttaggcccaacacaggtgccgactgggtcgacgttggggtctgttgaacgaacagccatctttgtccgatcgccagcttcgcgagcgattgagacaatttcaacggtgccgtcataaatttctggaacttcttgttcgaataaacgtttcactaaatcagggtgtgtccgactaacaaagacttgtgggcctttagttgtattttccacttttgaaacgtaaaccttaatccgatcatgtgcttggtattcctcgtttggaatttggtcttgcttgcttaaaacagcttcgatcttgcctaagttgacatagatgaacttgttatcgcggcgttcaacgaccccttgcataatttcgttttcgtattgactgtattcattgtaaatgatacttctttcagcttcacgaacccgttgcataatcacttgtttagcagtttgggctgcaattcggccgaagtcttttggtgtgacttcaaaacgaattgtatcgcccacttcgtatgccttgttaatttccaaagcatcttggtagctcacttcaagccgtgaatcaaacacttcttcagtgacttctttgacagcatagacgtggatgttacccttcttttgatcgaattcaacttccacgttttgtgcttgaccgtaattccgcttataagcagaaacaagtgctgcttcaagggcttcaataacaatctcttttttaacgcctttttcttgttctagcgcatcaagtgcacctaacatttccttgctcatgtaactagcctacctttactaaaattcaattgctaagcgagctttggcaatttccttacgattaaacgttacttctttttgacgcgttttaattttaatcactaaagttaaagtgtcatcatcaagggcttttagtgtaccttgatagattttctcaccatcaacagcttggtataacgagatatgaatgtattcgccaagtgctttttggaaatcggcttccttctttaaaggacgctctgcaccaggtgatgaaacatctaagaaataagcctgcggaattggatccgggtcgattgaatccagtttctcacttaacgcatcgtttactaaggcacaatcttcaaggtcaatgccatttggtttgtcaatgaagacgcgcagataccaactgctaccttctttaacaaattcaatgtccactaattcaaaatggtgttgatcaagaatcggcatgatcagatcatgaactgtttccacaacggtactcaaatgattccctccaattcatttttatatttcagattagacgtgctccaataaaaagagtgagcatttctgctcactcgctctgaagtatctaattactgataacaatataccatatttttcatgaaaatacaaacaaccgctttaattttcagtggttgcgacgctattttgcgtcttacccgtcgtcaagatttcatggaagttttcaaaactaatctcgaccatgttcttgagggcttcatcagtattcgaaccaacgtgtggcgtcaacaagacgcgggggtataaatcaatcaattcttgggtggttgcatctggcacaggttgatctgctgggaattgcttgaagaagatttcgccttcagctggtaacacgtcagcggcgaatgcaccaagttgatcagctttcaaagcatcgataatcgcacggttatcttgcaattgaccgcgggctgtattcaccaagattgcatcgttcttcatctttgcgattaagtccgcattgatgaattggtcgttttgaccagcgaagtatggaatgtgcaagctgacaatgtcactttgggctaataattcatccaagctgacaaaatcaagcacttccttagcgatttctgatggatataagtcataacccacaaccttggcacctaagcctttgtataacttcgcttcggtgtagccaatcttgccagtcccgataatcccaaccgtacagttgcggacttctttactgaacatcactgggctcacacggaaatcatgatgggctgtccgattcgttgtgtaagtggtgtgacgcaacaatgacatccctagcgtcaatgccaattcagcaatcgcgtttggcgagtaggctggcacgcgagcaacttccatgttgtacttgcctgctgcggccaagtcgatatgaccgtaaccgactgtccgggtaaatacgtaacgaatcccgtattcattcaacttcgctaagttttgcgcatcagcggtacagttggcacgtaacaagaccgcgtcatgccccttagccgtttcgatattgtcgtgcgtcaataagtcttcaattaacgttaaatcataatcgtagttgttatatttattgaacgtcgccacttcattcggacgaacgccgtaacaagcaattttaaacatttaatttccctcttcctagaaaatcccgatttggttgatcacttctaaaatcactaaccagactggcgtcatcacaacagctaagaccgttgataataatgacgcgttcgatgccaagaccgcatccttgtcaaaactaatcgcgtaagcagcggcgaccgttgccgttggcgttgccatcatgatgacaatcgttgccaaactgatgtagctgactggtaaaatgtgagtcattgttaagatggccaataacacgatgtttaaagcaggtactaaaatcactttgttaatactataaagccatgatgtcttgtccgaagcagcttctttgaagctgatttcgccaagtgttgtcccaattgctaaccaagctaatggtgaacataaaccagctaagtacgtcattggtttgaacaaccatggcgctgtttgatcaattcgtaagaaagccactgaatgcccagcaaccgccacttgtggtaatgcgccttggattaaccagatgattaaccccgcaaatgtggcgatcacgattggatttaagaacatgtttttcaagttcttcgattccatcttcaagccactcatcttgatgtatccatatgagtataagaacacacgataaccaatgttgaaaattgagctatacataacccctttagctccgaaaacggcgccaacaattggaatcccgaagaacgttgttgaaccaaagatggtcaacacgcgtaatgtatcttgttgatcacccttaaaacgtaagtataacggttttgaaattaaaattaaaataatatagatcaagaagccccaaactaaaacgttgatgccttcttttaaagtcttcccattaatatcttgcatgaatgagttgaatgccaaagctggtaaagcaaccgttaaaacgacttttgacagaatcttcccaaatttatccgtgaagatctcgcgtttgcggcagtagaatcctaataaaataataaacactgtcgacgtgatcgaactcacaatatccatgttcgtaaacgtcttcgttaaaatatcgccaatactcatctgtactctcctctgttataacatttagtccgctgtattataacacggacaactggtatcgattataacaagaaagtaacggaaaagaaatagggcaaaagaaaaagagtgaaaaataacttcactctttctcagacctaaattttgtattcattttcattacatgctatatattaattatctaaactgccaaggaggccttctcatgcccagacaaagcatcttcaacatgtctctttccaaaatctaccccatgctcgtccaaaaagccgaacgcaaaaatcgcacccaagccgaagtcaatcagattatctactggctaaccggctactcacaaaccgaactcgatgtccaacccgcaaaagacattccctaccaaacgttcttcgaagaagcaccgcagatgaacctaaactgtaatctaatcaccggcgtggtttgcggcgtccgcgttgaagccaatgaagacccactgatgcaaaaaattcgctggctggataagttggtggatgaactggctaaggggaagacgatggagaagatactacgagaataactaaagcactcataaaaataaagccttagggattagcttgaaaaactaatccctaaggctttattcattacacatctaatcttttaaaaactgttgttgaactggtttaaacaaatttctaactgtcccaaagcgaggcggataatcattagagccaccagactcaatcactgttccgtctgcataggtcgcggttactgaccattgctcaccatcaatgatagactcgttaatataatagtcagcccacttcggaagttgcaatcttgaaagtcgattacgaacccgacggatagtatctacatccaattgaaacctaacctcttcaggatgaataaattcatgcgttaccattctgccaatcatcaaaccagtttctaaatcgagactatatacttcatgcgggccaaaataaccatgacttgcgaattcaaatttagtcagtggattacgcattgaaaatcagctccatttcattgattaatcatcttcaataaaaaagtcttcatcgatatcaaatgttgtatattgcttcttaacattcacgccaacttggtattgcagcatcaggtcgctcaaccgtacgccattaatcaatacaatatgctggttctttgcatactcaattgcaccattcgagaaattagaggttgttataaaaacgccacggtctgagccaaagccactcaacgctccaaagaatgcctgcatcccatttcggccaacgttgtttcccacttgataccttttagcttgaatataaaccgtactagttcccaaggcatcctgattaataataccatcgataccgctatcattactcttttgtgtcacaaaagcttgcccgtttgttcctttatatcccattgcacttagtaatttgacaactaatttttcgaagaagtatggtgttcctttacgaatgcgatcaagtaaatcaatactaacggtgtcattatagtcctttacaatagggtctacagtttgtatcggttcaaccgaatctgaatcatccgtcgactgactatcttcagttttttcaagattccctttttgttttaactcgtcttggtgttggataaattgtggtagcttgtggattatctcagaagttaacttaccgccgtattgctcgagtaattgtttacccaacggtgtaattaaatagaatcccctttttggccgttctattaaaccaccaattgttaattctgaaataggaaatgtcgttcgactatctataatattgacgtcagggtatttttctgactttaactggcgtagattatcaggcaattgcaaactgtttacaattgcctccgaaaactcttttcgtctaatcgcagatgacggctcctatgatggaattacggacaaactgttcgatataatacatcataaaggagctttttattatggcaattggtagattgcaaatttaatccgaatttttggacaaatttgtcagcatcacctgatacggtgtttgccagtcgagtattttaagcggtcgctggttaatttggagtaacgtcgtcgttaaatcttgagcactaatgtgctcaaaacgagtccctttaggataaaaataacgtaaattccgattaaagcgttcattactaccacgttcagctggcgtataagcatggcagtaataggtcttaataccatattgtgattcaagtgatactagacaaaagatcagctcctaaaagatgggtttgtggtaaacaccattttaaaggaagctgatcttttttgtccgaacagcgttcggattaattttacaatctaccatttgaacagaattattcagaaagagattatgaaaaagatataaaaattattgaagcagaaataatataaatagggttcttaccaagggactataaattatataaacatataaataacccccagcatctatattatagatattgggggttattctttcaatgttttctaggggttattttataattatagcccctgataaaccaataatacgattcaattaagtaacatggatagagtttattccatgggtttaactttctcctctacaaaattaatttcctcttgattcaatccatattttttatagagttgttgatcaatttccggtattgactttgtccagtcaatatctgaatttgatgaaaaatcttgaaggggaacgtttttccatacttcttttgattgattgtgttgagtaattttcattgttccaagcataactcgcataaatttagacttcacatacttaaaaacattctgggcctctgaatcatcattgaatgatccaaaagaaataaatgtttgtgtgtacccgacaaggggttccccgataaggggagttgaaagagtctctcccaatgctccggatccgtttgaagctggtaaaatcactttatatttttcgaaattaggatgatccatcaaataagacttatccatccatttataaactcgattattattttcacgacctaaaattcttatctgtctgtcattttgttgattagaaaaaaatatctcaggcaatttatcaaagatattagaaccaatggacttttcttcgccaatcgaaacacgtccttttaaaattgggaaatcttcataaattttagatgttaatttataactacttttcccatacaataactcattaaacgattcgaagttatctgtaacaactttgcctaaaatagaatttaattctgagaagtgtgtaaaagtgtcaattgctccaaatattttatttttatcatgataagtaaccacaattcctcccttaatatctgtgttagggaaaattttagaactattttgttcataatgaacaacttttaaatgttcatcagctagcattttttcattccaagatttaggtgtctgacctgcattaaataaaaatcgtccaggtgtaatcaaaactgatttatcagaaatttcataagctaatttgataaattcgtgataaactggctcatctcttgatccgtctttaactcctgcttcctgatagggaggatttcccacaacaacatcaaatttcattacattcagtcctttttgtatttcctctatggttctatccatatttgatttgagcttttgattaatttctttcacatataaaatattagttgtccaatcattatatcctactaatgtacgctgggtaatagtttttgccataggtgttttagcaatgacgtaaatattttctctcaatacttcttgtattatttcatcttcatcaatcttactgaatcttcctgctctatcatcatttagcttatttcgtttttgataaaacaatgaacttgctacatagagaggatatagacctgttttagaattgatttcaagaattttagtatcggacttaaatacttcttttgtgatctcggtatcaacccaagtaatcgaatcttgtccgttcaatgtggtgttttcaaagtttgcatcaaaataacgcaatccgccaattgttttagaaagctgtagattaacaactctccatggtgtcaaaacagtttctttatctggatttttgaaggttccgaaaagttctgcgattttctctgctctttctgtgtattctagatcatcataagactgagccctctgtcggataattcgtcctgcttcgacaaaaacctctggatcataatactttgcgaaccgcttaaaatcagactttttaatgccttttggcataaactcttcccatgaaatgctatcaacatgattgacaaattcatcgattcccatttccttatcaacctcaataggcataccataaatcatcatcggaattcgtatggaaattccacgcaaaattgaaatcattgttttgcgttgttttttagcttgtttgactttttcaataatttctttttcttctgtagtgcgttctcgaggcttctttttctgagctttttctcctttttcatactcttcatccgttaatccattgacgtttatttcaactttctttggtagtcctgataggttagtttttccaacaatttctttcaagttattaaaatcattcaaatctgcttcatcaagtgtaagtaattcatcattgtaaagtgaatcgtcttcaaatcctgaacgaacagctttttccgcataaacttttttgagttgggtaagcattctatcaacattaaaaactttcataccatggtctgtctgtcccaaaataggcatgaaattgagtaattgtgtcatagcttctttttgttgtaatgtatttttcttacctaccccggaatttatttgtgcactttcagccatgacagtaagtgcacgatcgggcgcaaaatcaaagatataacaatttttcttcattcccaatttttcatgcgaaaatggcgtttgtgcacggaaggcagcttggagataattcatagcactattagtgttggaaagaaaaagaacagctgtccattccggaatattaacccccgttgtcagtttacgaacagtaagtgtaatggttttactctgactcggatctcctattgcttgccgcactttatccaaatcaccttctgttgcgacttcgtttatatctgacttatcatctttcacaacattgataattttatattcatttccaaaaatctgatgatcattaagtaacttctcgaaagcgttcgcttctttaactccaggtaataaccataatgtatgccgcaattcgttacgatattgattagttgaaaagggataattagttttactatttggattagtaatattatctaagaatgactgaatatcagacttatgaacgaactcattattttcattcacacgaaagaattcacggaaattaaaagattttgaatcgtccgaaaaacgttctttattcttcatatcaaacgtaaacatattaacttttggcaatgattcataagggtttttctctgtgggatgttccaatgagtaacggagtttcgccgattgttccattgtgtaatcccatgtgtaaacagagtcctcactatattgatcttgaatattgaacggagttccactcaatgacaacattttagtattgtccttttcaagtgatttcaatacattttctgcaagttcagtctgtgtcccctcatgtgcttcatcaacgatgattaagtcccagtcaacatcagaaaactccttcagattaacttttcctcctccataacggagcttttgaatagacacaaagtagataaatggcgtgtttcctgattttagatccttcaatttaaaatgtgcaccatctgaaccataacgatagccttcttcagccatgttcatctttccaaaatcctcaaaccatgaatcagaaactataggccgatgggtcatgatcaaaactttagaatatttttgctcttttataagctctaatgatgtcaacgttttcccaaaacgcattttggcattccatagcatttttttattctttttgaaattttttcgagttttttcgaccgctaatgattgttctggacgaagaataatatgattgtcagaattttctttttcaacactatttagggcagattgaccttcttttactgctttaattgctaatttggctgtttctaaatctgttttaaaccattctgatccatctaggaattgcggaggctgtatgcctgatcgctttaatacttcatgaacatcatggtcattaaaccaagtttttgttgattttttccatgctaattcgacccattccaggacaaacttaattcctgaggtcttcatgtactgatttattctttttgcacctaccgttcttaaaaaatcactatttggcgaccaatctacctcaaaatcatcaggcgcggtggcttctcctattttgtgtgcatccgtataggcaggaaacattccagaggaattatcggctgtttgtatataaattagtttacgctcagctgtttgatagagtttctcagcttttggttctaagaaatctaaatatgctgtctgaatatcaatgtcaaaatacttattcatataccacactaaaatagtaaaaattttatgaagtacttgcttcgcattttcttgggtagagctatgactatttagattgtgagctgaatcattgccaagacgtttaatgtcataaaacgcatcaattataaaatgatcaattggaaactttttaagttcacgcagaatatcattaaagctatcacgatctgataagctaattttttcttttaaagcaatttctcgtgctgtattctcagctaactttctggctttcgtaagtgtgccttcataatctttttctgtgtaatttttttcagcaaagttagcggtttgaaataaattacttgtttctatttccaaagttaaaaaatcaaaatttgacatgtcatccttatcctaactgataaacttgcttaatatctaatattcttgctaaagaaagttcttcatttttttcttcattggttacttcaaaatcaaataaacttaactgaccttctggaatgatcttacctagaggttcttcattatcaaataaactttcaaaagagaattgtattatttccactttactactagatcccggaactcttttccattcattaaacacaatgggaatatcataatcaggatgtttttttgttaatgtattccctcgtacaatattgtggtttattatatatagcgcagatttgtaaacgtctgatatactttttaattcctctttaaaagcttcttcataccaatttaaatattggatgaacatgcgagaacgtgcaacatctaaattatctgctaaaaattcaatgccataaatcgaacttagtgcaaataaagattttgttttccagtgtcctgaactgaaattatcagtgacggattttaatttacgttctaaaattttcaccaagaaattaccatctcctgcggcaggctctaaaaatgtggcatctatagtttcactagcttgtttaataccttcaatgtccaacattttttgcaccatccattgaggtgtgaaaacttcgccgtgctgttgcacacgctcttttgacttaattaatttttcatagtccataatactcctcctatcctataaaaagactgcttaattattcccaaaaaagtgccaccattttttggagtgtctctctacctcttgctgttcttctattttagatagtggattgaagtcaatattcctcaatgagttcggcaatttcagcagtggtaattcccttggtatacaactgaatgaccgttgtttctaaattatcactgtgccgaccgtaggctggcaaggtatgattttcaaaccggccattgcgatctcgaggaatggttaagttaagtgggccgtacttcgtatcaaacgagcgctcataactgccgttgcggttattaccagtgttaatcccagcgtatgagtagcgttcgtaacccaacaactctgccaattcggtttgaagcagctggttaatcgcaatttcgaggtggtgacgaaaaacttcgtccaaatcttgcttttgggctagtgcagcgataatttctgtggtaagttcattcatggggaatgcctcctgtgatgttttctgtggttactaaatatcataagggaaggcattccctatttctatacaattcagaaatcttttatgcatttacacaagatattttacgctctcatttcctttttaataaaagttatactataatagaaaatattgtagtataaatagtatgtaatgtgattgattatttttttgtttagttttcgaggaggatacgaaacggatgactgcagaagaacagaagcgacaccatcaccataagcaccggcgcagagggtggacattaacaaaagtgattttagttgttcttggggtattgattcttgccgggggcgcattcgcagctaaggtctatatggatgttaatcaaaccgccaagacagtgtataaacctaaaggtaagacacaaaataagcgcaaagtttcagaaaaagtcgaactaaataagaagacgcctttctcgatcctcttactcggtacagatacaggggaactaggccgaaccgaaaaaggccggaccgatacaatgatgttggctactgttaatccagccactaaggaaacgaatatgttaagtatcgcccgtgattctcgcgtgccaatcgttggctatggtcagacggctaagattaatgccgcgtatgcctatggtggaattccaatggcagttaatactgtccaagcattcttaaacgtaccggttgattactatgtattggttaacatgaagggcttggaacaattagtagatgcggtcgatggggtgactgttgagaatgatttagacttcacacaagatggacatcactttagcgtagggcccgtatccttgaatggtgaagaagcattggcattttcacgaatgcgccatgaagactccagaggtgattttggtcgtcagttgcgccaacaatctatcgtacaagcagttttgaagaaggctttttcattgaatatggtgacgaattataataattttttacaagtcttagaaaataatatgcaaaccaatattaccttgaaagatgcaattaatattcagaaaaattatggtgatgcaatgaactttaagacgcatcaattgaagggatctggtcaaatgattgacggacaatctttccaagtgatgagttcatctgaagtggcgaatatgtcgagaattttaagaacccaattagatttaaaataaccacggaggaagctaaccagcaatggttaacttcttttcgtgtgttgcaaagtagttataaccgttaattaacttttggagggtatcatggaacaaacaattaatattgaacagattttcggcatcttacgtaagtatcgccgtttaattctatcatcgacagtggtgtgtacagtactagctgttgtgattacattctttctgattacaccacaatacagtgcttcgactgaattactagttaatcgcaagcaaagtggcgatgctaatgttcaatggaatcaagtccaaacagacgttcaaatgattaatacttataaagatttgattactaagcccgtcattatggattcagttgctaagaaaatcaataagggtagcaatcaaaaattagatgatacaaccatcgcaggcatgattggtgtttcaaacaatcagaactcacaagtcttctcaatcactgctaaagcagataatgcttatactgctgctgatattgccaatacaacggcgcaaaccttccaaaagaaagcccctaaaatcatgagtggaacggataatgtctctattatttccgaagctaaaccggatttaacgccggtttcacctaagaagaaattaaatgtgttaattggccttgtgttaggggttttacttggtgttggggttgccttcttacgtgagttaacggataagacagttaaagaagaaagcttcttaacggacgatttaggcttaacaagcttaggtgttgtgaataacattgctgaaaaagacttaattaaaaaagcgattatgagtgtcagcactagccgcttatcgagaagagggtaagaaaaatggggttatttagaaaagaaaaaaaattagatcaagcaagtatgaaagaaggggttggcttaattaccttaaccgatcccacttcagtgattgccgaacaattccggacaatccgaacgaacattcaattctcgtcaattgatcaaaaactacgcagtgtcgtgttcacatcttctggcccttcacaaggcaaatcaacggtgagtgccaacgttgctgtgacctgggctgaccaaggagttgatgtgttattagtcgatgctgatatgcgtcgtccaacagtgcatcaaaccttccaagtaccgaataaaaaaggcttaacatcactattaacggaagaaaccttcgatttaaatagtgcgattcaaaaaacaccggttgatcatctattcgttttaccgtgtggtgtcgtaccaccaaacccgtctgaattgttaaatacaaagaaaatggataaattaattttagaattgacaaagcactttgatttagtgattttcgatgcaccacccgttatttcggtgacggatgcacaaatcttagcaagcaaagtggatgggacaatcttagtcaccccacaaggaatcgcggataagggttcgattgccaaatcgaaagaacttttagaggttgttcatgcgcgaattttaggaaccatcatgaatcgggttaaatcagaaaatacgggtggttattatggtggttactatggtggttattacggagcagaagagaacaagtaagatttaaatttgggggatataaataatgagtaaagttttaattacaggtggcgcaggctttattgggtcaactttagcagataaattggtggaagaaggtaatgaagtggtcatcgttgatgatctttcgatgggatccaccgaaaatattccacaatccattaatgttacattctacgaagaatcaattacaaatcatttctttatgactaagttattaatcaccaacaattttgattatatctacctattagcagcggttgctagtgtagctgattcaattgaaagaccgattgagacgcatgcggttaatcagaatgctaatttgaatattcttgaaacaattcgcaaagaaaaattaacacctaaaaaaattgtttttagctcttcagcagctgtttacggtaatggtcctgaattaccgaagaaagaaacttcttcaatcgatccaatgtcaccatatgcaattgataaatttgcaactgagcgatttatggttgattacggtaaattatatggtttaccaacagtatgtacgcgtttctttaacgtttatggaccaaagcaaaatccgaagtcaccttattcaggcgtgttatcaattgtttcagattgtttagtaagagatgatatttttactttatttggtgatgggagtcaaactcgggactatgtttatattgacgatgttgttgatgcgttgttgatactagcaacaacgccagaggctaagaatgatgtttacaatgttgcgacaggcgaaacaattagtttagttgatgtgattaaagcgtatgaaagtgcatcagggcggaaagtaaaagtcgttaaaaaagaagctcgattgggtgatgtacaggactcattagcagatattacgaagttaagaggcttaggttacgaacctaaagttaacgttactgctggcttagcaaaatattgggatgcgttacaggaaaagtaggggggatacttttggaaacaatgctgaagaaaaatcaaagcgaagtttgtgaagaatcatatattaaaaaattggatgggatgttagaacatccgtacataccaatcaagcatatattggacgttgtgtttgcaagcatcattttaattattacatcaccagtcattttattatttatgttacttgtccgtttagagtcaccaggtggtgttttctattcacaagaacgagtgggcttaatgggtaagaaattcaaagtgacaaaattacgttcaatgcatgctgggattgaaaagaagagtggcgcaatgtgggcacaaaagaatgatccgcgcgttacaaaaattgggcattttatgcgtaagacaagaatcgacgaattaccacaactatggagcgtgattaaaggcgatatgagtttaattggccctcgtccagaacgtcctaattttacagaacagttttccaaagaatatcctggctttgaacaacgtttgcgaattaaaccgggtttgagtggctatgctcaggttcatggtggctatgatattacaccgggtgaaaaggcacaattagataattattatattgatcacttcggtataaaagaagatattaaggtgttttttgaaacaattagagttgtaataacgggagacggtgcaagataaatgagaattctgtatggtattacagcatctaactggggcggagcacaggaatacgtctttcagcttattaagtacgagactaaattagggaatgagataggaatttttataggggaagagggggaactttcttatagacttaaaaaggtaagcggagttaaagtctatattgttccagaacttcagcgcgaaattaatctttttactgatctaaaggccataaaaaaaattaagaaggtttgtttggattttcaaccggatattatccacttaaattcatctaaagcgggagcaatcggacggcttgttgcaagaattttgaagattaagccaatagtgatatatacggctcacggatgggcttttacggacggagtaagcaagaagaaagcactagtatataaagtattcgagaaaatactggctagattgacggataagatattctgtgtatcccagcatgactatgatatagcccgtaaggcaaatatttttgttaataaagagcaaggaaaagtaatttataacggttcagatttcgtaacatcggaacatgatgaaactgaaacccaagatgatatcccacgaatattgatggttgcacggtttgacaagcagaagaaccaggccctattaatagaatccctaaatttagttaaaacgaaatacaaattatactttattggtgatgggccaacgagagaatattgcgagaaaatggttgagcgttttggattatccgataaggttgtttttgctggatttcaaaaggatgtacaaagttttttaagaaatagcgatctcttttgtttaattacaaattatgaaggactgccaattagtataattgaagctatggcaatgagactgccagttattgcaagtaatgttggtggtaacaaagaacttgtaacggaaaaaaatggagcattagttgaaaataataaagaaaaaattagtttagagatagaaaaacttttaaatagtaaagagttacgtctaaaaatggggggagagtcttacctcatgtataaaaaacaatttacattagataaaatgctattaagtgttgacaagagctatactgaattaattggaggaaaaaatggaatatagtttgaaacaaattattgacagtaggacaccgcacaaaaaatatatagataaacttgatgtttgggttttcttagttgttagaccgctctctaatctattaacttggttctttctgaaattaagattatcagcaaatatttcgactgctgtatctactattattggtactctgggtgcttttttaataatgataccttctacaaaatttacgttatcagggcttattcttattaatttctggattgtttttgactgcatagatggtaatattgcgagaacaacgcgaacctcatctaaaatgggagaattctttgatggtgtgagcggatatatttttctatctttgttatatctgtcaataggtgttaacgtttataataattattctttggaaattagtaatgttgatttcacttggctatatattgcatttggatcaataacttcgatgtcctgtattttgcctagattaatcgataataaagctaaaacgatgttttctaattatagttcagatgtaagtaacaaagatggatattcaataatttatataattggtttgaatatagcaggagttgctggcttggctaaccccttgcttctcgtagcttactttacaggaaagttaaacctatatttagttgtttattttgtaattcaaactggaattggcttcttatccgtgtacaaaaccatgagaggaatagttgttttaaacaacgaaggggaatagcatgaataatgaaactggtccgctgttttcagttatcgtaccaatttatgaagttgctgaatatttaaatcaatgtgttgattcaattatgaaaaatagcgtaggaagtaagtacgaagtattgcttatcgatgatggctccaaggatgcctctggttctatttgtgatgattatgctgaattgtacgagaacattagaacttttcataccccaaatggaggattatcggctgctagaaatttcggtttaaaacacgcaacaggtaaatatattctttttattgactccgatgattggatacgatcagatacattacagtattttgaaaaaatttattttgaaaatactgatgttgatataattgcttttgattttgcagtgccagatagaaatggtaaagatttggggaaaaaatatggttttagtgaaagaaagcttggaaataaatttatttcaggtacaaaggctgtagaagagttgtttaaaggaaatattagaagttatgcatgtatgagtttatacaagagagatttgtttgttaaaaataatattgaatttcctacaggaagaaattatgaagatgttgctacgacgtacaagttattatatgcgtcaaagatggtatatctattaagtcagaaactgtatttttatgtacagagaaaaggttcaatttcacatgttgataaaattactgatgtacaagatattattcagaataacattgaaatcaatgacttttttaaggggaatgacaattcaaaaacttttaatacattattaaaagtttttcaaattcaaagaatatttacaggctataggattgcagtaaacattaaatcaattgaagcagagaagtttgcaaaccaaattaaacaagaaattctaaaagatgcaaattcagtagatgtattgaaaatgttgcctaagaagcagttaatcaaagtcggtttactgaaaataaatattttaagacatctattgaaaagatcgtgaggattctatcttgataataattggtatcttaatttcgattttatgtcctcttctagggttaataatggggttaattagaatatttactggacgaaatctcacgtgggtatggtgcttattatcagccactgttattgcgataccatcacttttctttgttccagatttaaatatggatgcaacggtttattttaatgccatgaatacgtttcgaaaatattttagttttggagatttatataaattcattacagctactccaacgatacttagagaatataagagttatcctggagctacgttcttattatatattatttctaaaacaggactatacacgctactatcttttataactgtaacattgtcttatttttctgtccttactgcagtttcttcattttttgaaagtaaaaaaacatatgggtacatatttactcaattaatatcattgtttacaattcactacttattttcaatgagtgttgtcagattttaccttgctgtagcactattattgatagttacttttgtagtaatcaaaaaaagtagtagaaaatatattatattatttactattcctgctcttgttcatccaggtataattcctccgatggtattagtgttaggaagtatgttatttagaaaagtttctaataaggttatgtattttctgattattacaattccgtttttatttagtgctggatcattaattcaaaaattaaatgtaaatggatatgttggaattcaaattggtaagttaatgcgatatgttaataaaagtgatttggttacaatgtttaccactactaagacatggacaattgaagctatagtagtaatttacctactcttatttatttttgctgtgcaaatcaataagaatcgtatcaataatttagatatacagaaaaaaagaatgattaatgtggcctattatttttcagcttttacaataggaatttcgccgtttaatattatttttattcgttatatggcgattgctataccatttacattagctggatttagtatattgcttagcaataagaatatcaaagggaaaaatgttattttctctacattaatactaattgtgattataagtattctcagtaattctgatatttcatatgttacctttagtgtaaggccaattaaagcgttaggtatgccattatttgaaacaattaagttgataacaaaatattaaattgggagaatagcatgaagaatgtagttttttttattaacagtttgggtcgtggcggagcagaaaaagcgctcatccagatactagagcgtattaatactaataaatataaaattaaacttgtcgtaataaagaatgatggaggatatattaatcaggttcctaaaaatgttgaacttatttcgttaggaagatatgaggacaatctatttagtaaggtacgatggtctatttattggcgtattattagatattttccgactattataaaaaaacaaattttaagaaaagtgaatattcataagaatgatttattagtctcctttttggaagggcaaagcactaagttagtaagtttatttttaaatagaaaaattgcatggatgcatacggattatcaattaaatagatggacgacggaattctttaaatcggctaatgaggaattgaatgattataataaatttaattcaattgtttttgtttcaaaacatggacaagaagcttttaataatttctttaaccaaaaagttacaagatctgaacgagtaatttataaccctattgatgttcaagaaataaatgaactggcaaattgtgaagcagacgatgtgagcaactgggtaagtaagacagaaaatacaattcgtatagtaagtataggaagattaacggatgtaaaacgaatggactggctaatagatgcacatgatcagcttaatagactaggaattctagtgagtactacggtaattggcaccgggaaactatatgaagattttcaaaaaataatagttgatagagatattaaaggcatctattttgtaggttttaaaactaatccgtatgtttatttaaaatatgcagatatctatacatcaacatcattgactgaaagttatccactgtcaattgctgaagcctatgcacttgaggttcctgttattgcaaccagaaactcgggatctaatgaactttcaagagagggaaagtatgcgcttttggttgattccaactacactgcattctttgaggcattaaagaatataataacggataatagtctgttagataattataaaattaaagctatagaggcaaaaaaacaatttgatgtcggatctgttttagaagatatagagaatttattggatgaagtgtttgaatatgatgaataatagtagattgaaaaattcagttttaaactctattgtctctagttcggttcaagttttaaatattgtacttaaatttatagttcaaacagtatttattcatcagcttggagccgagtatttaggtattaatggcttatttgtaaacatcttatctattctatcatttgcagaacttggaataggtactgcaataacattttctctatataagcctttagctgtgcatgatgaaaatggtattgcagcagtaatgaattttttcaaaaaagcgtataatttgattggactttttgttgcagtgctaggaatcataattattccactattgccgtatttaattaagaatactgcgatttcaatgtctaatatacaaattatttatttattgtatttgacaaattcagttgtgagttatttttttacttataaaagatctttattaattgctgatcaaaaaggatatattagtgtatttaatcagttaattttttcggttattcaaattgtttttcaagtaattgcattgatttatttaagaagctatctaacatatctgcttattcaaattttatgcactatactatccaacgtttttatctcttttaaagtaaataaaacgtatagttacttagcaaagtataagaatacaaaaatcacaaaaaatgaagctgccgtgataaaaaagaataccataggtatgatgggatcaaaagttggtggaatcgttgttagcagcacagacaatctaataatatctggatttgttggtgtattctgggtggggctttactctaattattttttaattgttaatagtgtggggttagtcttgacgcaattagtgacttctatatcttctagtattggaaatttaattgttcttgagaaggatgataagaaaaaggaagatatttattttcagcataactatattaatttgattcttatattattttctgcaagcctattgatgacgttactgaatccttttataaaagtatggataggagataaatatttattatctacctttacggttgtaacgattgttgtgaattttattgttactcagatcagacaaacagcaataacctttattacatctttcgggcttttttcaaaaattggtgtaaaatcaatttttgaagcactatttaatttaattttttcattaacatatgtgcttatatttaaactgggtgtttcgggtgtattactaggaacaatatcaagtaatatcctaatcaatgtttggtatgaaccatatattgtttacaaatttggatttaatagaaagattgaaaaaaagtattttattcacctttttggatacttaactgtaattttattaaatatgttgacttcattttatttgacgtcaaagttaccacagacatttatttttttaattattagggctttaatttcatgtattctatctttagtttttatgatgatatttttaattcacactcaagcttttatccaattgagagatagattaatgagaataatcagaaaataattattcaaacaaatagaaattaagtacattgatacaagatatagcagatttatctagtgaaataagagatgtagaaacaaaaattgggactatactagagggaagctgattaaatgaaaaatattttaataattgggggcacaagtggtttagggtgggcacttgcgaatgaacttgcaaatactgaaactagtgaaaatgtttatattgttggtagaaaacttcatacgaaaattaaaaattctaagataaagtttttccaaaacaatgttttgttagctgattataaattctttgatcagttccatgatatagacgcgttatttattacagttggaatgggaagagtagctaagttcgataatctctcaatagctgaaattaatttacaaattgatttgaattacaagatagtagcagcgttgcttagatatttctatagtaatataaaaaatacagcgaatttcaagacggtggttgtcagcagtatagcggggatgattaattcacccttattttcagtgtatgcttcatctaaggcagcaactagttctttgattgaaagcctgaatattgaattggagctacaaaattctgataatagaattttagatgttcgtccagggcacatagcaggaactcgctttgctaataataaacagatagatttgaagccagcaaaaaaactggcggaagaaatagttacttcgattgattccaatagtaaggttttaattccaagctatagagaaatttataaagatgtgattgagagaaacaataaagattcgcataaatttggagttgaaagttatcagtataaagttgctaatggtagagagactgagaagcctcaaattagaattggatatatgagtggtacatttgatctttttcatattggacatttaaatatgttaaaaaaggcgaagcaatattgtgattatttagttgttggtgtacataaagatgccagtcataagaataaaactgttttcatttcattagaagaacgaatggaaatcgtaagaagcgtaagatatgttgatgaggtaattgtatcacttccggaggatagcgatgtaagagaaattattccatacaattatttgtttgttggatcagattataaaggaaccgaaagatttcaacgttatgaagaacaattcagtaagttagacgatgttgaaattgtttattttccatatacaaaatcgacaagtagtactcagctacgcagtgcaatttcgcaggataataaataagaattggtaggaatactatcaaagtaagcaatataacacaaaaacggatgctctgtctgtaattagagcatccgttttgtgctatacaagtagcttactaaacttcccctgcaccttaaacttaatattattagccgttcgccgtgtgatgtttagatccacggcgatttcttttaggctggcattgtagaaatagcgaagaactaagaagcgtttttcgcgtggtgtacagacttgatagaggcgttcgaagaggtcgttacaaatggcggtgtcttctgggttacagtatggatctgcgacttcgtcgaggtagtccatcacggaatcatcatcgtttgtacggttaacgaagccgattcgcttgtcgcggttattatccttgcggaaggtcatcataatcgcccatttaacggcctgatacgcgtaaaccatgaagcggtgggtttcgacttcaatattgcccgggaaatgatcgtaggcttcgacaaaggcaagcacgccaatttggtagagatcagcaaagttattgcgctgccgtggaacgtggagatctttgagaacaccatagatgagggtgtcgtcttgtgtaataaaatcaaaggcagtttgtaaatctgattgggtcattgtaaagcatcctgtctactatgagctcacagtgtgaattaccggtaagttcactatagcgggtttgctgatggaaggataaccaccgtttttaacggtgaatcaacatatgcaatccatcattttcgaaaacggattgaaataccaatgaaaataactgaaagcatcaagcttgggtgctttataattggcgtagtttttgaattaattctctgacacttttgatataacattgaatatcgaatggactaaattctgtgtattcatgaatggcagcttggtagatatagttttctttttgaatcttaagtgcgttaagtaatgaaatgagttcggcaaccgtcttagggacgttggcacacagtgagcaatgacaatcgtcataccgatgaatgatactttctgcaaagcacgtttgtaagttgacttggtagccgaagttagttgcacagataatcaaacagccgcgtagaatctgcccgatggctgcacattgatgaatttcagtatcgatttgacggcctttataagggaggatacaggtacagtcatttagcaatgtaacgtagagatggttatcgctaacttcgtaatcacggacgtagtggagcgctaaccacggtgcgttttgatgagccgtgccacttaatggtaaatactgatattcgccattgatgtgtggaatcttacgataccaattgaaacaatggcaaaggtaccggggttgtgagaaatccatgatctgatggcgattataagcgcgcattagttgccgggtagaacgcggactaatttggagaccggttatgcggtctaacacaagactttgcgattttttatagggaataatcaccattgtgtcactcgtaatactagtttggtaagaacggggaattgacgattgatccagctcacagaagttataatcaataccacgtttgatgatgagtggcacgggaagacattcatgggatgtattgacatgtttgggatgtagtagaaacatcgaagacctcctttattgttaacatcttgagaataccaatgatgggaatcgcttacaaaacaattgtgaaaagattgataaaatcctaagtgcttgttaatcttttcctcattttcggcatataattggtgcaaatccacttttttatggcatactgttattagactataagttatgggggattttagcagatgaaagtacgtaaagcagttattccagcagccggattgggcactcgttttttaccagctaccaaagcgatggcgaaggaaatgttgccaattgttgataaaccaacgattcaatttatcgtggaagaagcgaaggcttcagggatcgaagatatcttaattattactggtaagggcaaacgcccaattgaagatcactttgattcagcaccagagttggaacaaaacttgaaagccaagaataagaccgctatgttgaagatggtcaacgaaacgactgatatgggtgttaacttgtacttcattcgccagtcacatccaaacggattaggggatgcagtgcgccttgcaaaatcattcgttgctgacgaaccgttcgtcgttatgttaggtgatgatttgatggaagataaggtgccattgagcaaacaattaattaatgaatatgaagaaacacatgcatcacaattagccgttatgaaggtgccacataatgaagtggacaaatacggcgtgattaacccagaaaacaaagttaaagacgatttatacaacgttaagaacttcgttgaaaagccagctattgataaggcacctagtgatttagcgatcattggtcgttacttgttaacgcctgaaatttttgatattttagaaaaccaaaaaccgggtcttggtggtgaaattcaattaaccgatgcgatcgatgaattgaacaagacccaacgcgtcttcgcccatgaattcaaaggccggcgctacgatgttggtaacaaattcggttatctagaaacaagtatcgaatatgggttaaaacacccagaagtgaaagatgacttgaagaaatacattatcgacttggcagaagaattaaaaaaagacactaaaaaagaaaataaataacctgtaaaaaacgttcaaccactccgaacattggaatggttgaacgttttttgttgttttttaaataatacggccctcacagtgatccacttcatgttggataatctgagcaatccagcctgagaaagcttgcctatgcggtttgaaggcttggtcttggtaagtgacctcgattgtttcataacgggttgtcggacgttcaccggtcaatgaaagacaaccttcagttgtttggtatggtttatcctgacgcacaatctgtggattcacaagaatcacaggtaagacgcccatttgaacgatgataatccgtttattgatgccaatcatgttggcagccattccgacgcaacgttctgtgttggcttgtaaagtatcacgtaaatcggtcagcacatcggtatcagctggtgttgctggaactgctttttgagctaagaattgcgtgtcacgcataatgggtttaatcatagtagactccttgagtagtagttcttccattatagcagaaaataaactcattcaattctcatttagtgaaagtccgccttatctgcgggcttttttaatgcgattatttagggattagagtctgcttttcaatattgtggtaaaaaattcgacaaatttggattttatgcttataattattaacatactattataaaacgtctaatctaatcttaataacgcgttaagagcgatgagagaagttggtcaggcattaggggaggatcacatgaagaaattactcgtatttttaggcagctgtttactcgcaggcttatttgtatttgggagtcaagtgaataatcaggttcaagccgctgaaaaaacttatgaaatcggtacggatgtgacctatccaccattcgagtttgcgaatgagaagaatcaatatgtcggtattgatattgatatcatgaaggcagttgcgaagtccgagggctttaaagtgaatattaaaccgttgggcttcaacgcagcggttcaagccgttcagtcggaacaaattgacggcgtgattgccgggatgacaattacacctgaacggcaagcaaaattcgatttcgctgatccttactacaagaccggggttgtaatggccgttcaaaaggacagtaagattaaaggcttagaagggttgcgcggtaaacgtgttgcgattaaaacagggacttccgctggggcctatgcgacggccaaagcgaaagaatatggctttaccaccgttacgtttgatgattcagataatatgtataatgatgttgtgaatggtaattcggcagcctgttttgaagacgagcccgttatgcaatatgggattaagacgggcttgaaactcaagattgtcaccaaacctgctcaaggtggcgaatatggatttgccgttaagaaagggagcaatcctgaactcattgctaaattcaataaaggtcttgctaaattaaaagcaaatggtcaatacgacaaaattaaagcaaaatatttaagtacagaatcaactaaaaaagcaaccgttgatcacagcttttttggattattgaaagaaaataaagatgcgttgttgagcggtttaggccagacgttattattaacagtcattgcgattttcttcgcaacgattttcggggttttcttcggattactcggcgtattacctaaccggtttgcgcgtggcgtttcagatacggtcatctatattttccgtgggttacccctcttggtgcttgcattattcatctatactgggattccaagtttaactgggcagaagattccagcgattgtggctggggtcatcacgctgatgttcaatgaaggggcttatactgcagcctttgtcaaagggggcattggcgcggttagcaccggacaaatggaagcagcgcggagtttagggttaccatatggtaaagcaatgcggcgcgttgtgttaccacaagggatccgcattatgattccatccttcattaaccaattcatcatcacattgaaagatacgtcaattttatcaatcatcgggattctcgaattgacacagacgggtaaaattatcatcgcccgcaaccttgaagggttcaaaatttgggcaatgattgccttaatctatctgatcgttatcacgttactcacgtggttatcgaagtacattgaggggagaatagataactaatgaatagaattgaagtgtctcatcttattaagaattacggcagtaacgaagtgttaaaagatttggacttaacggtcggtgataatgaagtggttgtcatgatcggcccctcaggttcaggaaagagcacgttcttgcgctgcttgaatcgcttagaagaacccacgagtggtgagattatcgttgatgggtacaacctcagtgatcctaagagtgatttgaatcgaattcgcgaaaaaatcgggatggtattccaacactttaatcttttcaaaaatctaacggtcgctgaaaatattacactggcaccagtggaactcggtaaaatgacgccggcagaagcaaaagaaaccgccaagaaactacttgaaacggttggtttatcagagaaattcgatgcaaaaccccaatccttgtcaggcgggcaaaaacaacgggtggccattgcgcgtgccttagcgatgaaacctgatattctcttgttcgacgaaccaacatcagcgctcgatcctgaaatggtcggcgacgtgttggccgttatgaagcggttagccaaagaagggatgacgatggttgtcgtgactcacgaaatgggctttgccaaagaagtggccgaccgcgtcatcttcatggcagatggacacattgtcgaacaaggcacaccacaggaaatctttgacaccccacaaaacgaaagaacaaaagacttcctgaacaaggtactaaatgcatagcgtgcgtttcaaaaagcacgtttaacgccaaccaaaaaagcggcccaccattacttggtgagccgcttttacgattcttaggtctttagaatgttagaatagaaataggaactagtagagaaaagagggattacgatgcgattaggcttaaaagcagggattaacgatcagcaaattgctgatcgaatgcagtatcagccaacgtattttgaatttcatttaacagccgaagatgtcacgccaaatgggctagtacgcttacgcgaaaaaattcgttatgtacgcagtcagcaggttgaacgaattattttacaccacccaatgagtttcgaagggcatcatattgaactgtcgatgaatgaagcaagttcgccagcccgataccgctttttatggcaatcaacacttgatttattgcagttagcgaaagctgaagatgtccaactattggtgcatggctcttatgatgatccaattgaagaattgacgacgggttacggtagtattacggatgccattcgtgttttgttcaagcgcctcgattatttacagcggattggtggacaaaatattatgttcgaaaattcaatttcaccgattttctattatggcaatccgatttttgatcaggccatctttgataaaggttaccgcttagcgtttgatacgagtcattgttttatcaagttgcagggtgatcagaatgctttcttgcagagtctggcaactttgcgtgagcacgtcgtccattatcatctggttgattcgatgggtttgaagcatgatgggttgcaattagggactggcaaaattgactgggcccgcgtattgccattgttaaatcctgatgccagttcgatctatgagattcaattagccgatcaaaatgatgcacgagaaatgattgcgagtcatcgttatttaacgcaacttgaacaaacattatccgagtagaattttgtcagcagcaacgcgaaaaccaaacaaaggatagtcccccgtctttgtttggacatacatataatgttggtagtagtttttttgatttaataataggctaaattcccactgcttcagcggctttttgtctgtggcctttaactgcagtaataggcgtggctgttcgtcaacgacggtgagctcaaagtgggcgataggttggagctcttcagggccttcgaagtagatgccatcgtttttgggtgtatcagctaatagctgtagtaagtcaatgacgcgcatgataagtcgtcctttctaatagtgcgaaaatcccggcaatgatcagccaacaaacacccgacaagctaacggcgatggttaggataattgccattggtgttagaacaccaatgagccaagtcgtggtgttgactgttggcacaaatgaaaacagaccagtaacgaggcagaccgcgatgactgtggcaataatccctggaatcgtacctttaaaatcagctgcggataagtcataaccaccgatggcaatcatgctagttaagattaaccagagcaagagagcacccggttgcgtcgtccagagctggctgaataagggaccgatggcgtttaactgccaagtgggatgttcagcaaaggtcatccacgttgcaaaagtgggccgtgctaataaccaagtcagtccgaaaatggcggctgaacaaccaaaaattggggcaatcccaatccagagattaccaattgttggccaaagacggccgggatggtatcggtgattgacatggccaagcgaatgatcgggattatcccgtagatttaattttaagagttgcatatcgataatttggtgttggaagattaaacaggcaacagcatggctgagttcatgaatcacggtgcctaggccgccaattaaaagttgtgagtaatcccaccaatgggctaagcgccgtttagttgaacgattgattagtgttaaaatcccggcaaaagctagtggtagcgcaattaccagtaaacaattaagcaacattgattgcaatatttgcgataagttaaatgaattgggcatgataactcctttgaacgactttatgtaagcctacaccaaagtttatcgcggaaacaaggggtgttaatcaatttatgtaaaacgcaaaaaaagcccccaaatcagattcgatttgggggctgtatgctgcttaattatttgtcagaaaagattggtgtttcaatctgttcaacgtatttggcaccaactggttctttgtagagttcaattccttttttaataaacatattggctgctgcgattttagtcatcgcacttctaactgtttcggcgtctaagttgtcatcaatattgtttaagcgcaatacacgactcttagcatcactgtttttaaattctaagcaaagttgtttcatcttgaattcctcctcaaagattggtatgttttttatttagcgatataagcagatttagtggttagagtagctgttgcaaatgtgtcacctgcgtggagacttgcgagggcttcgccaactgcttggatttccgtggcttgaacgtcttcttttacggcggtcatacgacgttgtaaactttcatttggatagtctgtattttgtaattcaaaagcgatcgatgttgctaaccatgatgtttgcatgtggattcctcctaaagattagttgtaagcgtcaccggtgaatgacttacgctaatgagtaatgcacgatgccgataaaatggtaaaataatctcagcttaccaagcggatttctaaaaaaaagttaaagaaattgtgaattaccagacgtttcatgaaaatttagttatagtaataattagacttatagatgaagagggatattatgcaagaagtggttattatcagtgcaaagcggacaccgattggtaaattggggggccaacttgcaagtttaagcgcggttgaattggggacagttgctgctaaagcggcgattgaagcagccgggattgatccaactcagattgatcaagcaattttcgggaatgtcttacaagccggttctgggcaaaacgttgcacggcaaatcgctttgaagagtgggatgacacaatcaagcacagcaatgacagttaatgaagtttgtggctccggcctaaaagcaattcggttggcgcagagtgcaatcgtcatgggcgatgctgacatcgttttagttggcggtacagaaagtatgtcacaagcgccttatttgaataaacaaatgcgttttggtagtaaatttggggatcaaacaatgattgatagcatcagtagcgaagggttaaacgatgcgtttacgcaccagccaatggggattacaggcgaaaatgtagcagctaaatacggcattacgcgtgaaatgcaagacgcttttgcactcgcttctcatcaaaaagccgcgcaagcgacccaagctggttggtttaatgaagaaattgtacctgtaacggtgcaacaacgcaaagcaacgcttgaagtacaacaagatgaaggtatccgcccaacgacaaccatcgaagcaatggcgaagttgcgcccagcttttcaacaagatgggactgtaacacctgccaatgcttccggcattaacgatggcgcttctgccatgatcgttatgagcaaggaaaaagctgctgcactcggattagtttaccaagccactttggtcggctatcaagaagtcggtgctgatccagattacatggggtacacgccggtcgatgcaattcaaaaattattagcgcaacaaaatcaaacattagccgatatcgatttattagaaattaacgaagcgtttgccgcttcaagtgtggccgttcaaaatgggttacaagtcgatcctgctaaagttaatgtggccggtggcgctattgcgttgggccatccaatcggtgcttcaggcacgcgcatcatgacaacgttaatgcaccaattgaaacggacgcaccaaacaacagggattgcttcgttatgtattggtggcgggttaggaattgcttttgaaattcaattaaatgaggcatggtgtaatgaaaaagcctaagttctatcaattaacgaaggatgaacgtttagcaacgcttgttgaacaaggtcacctaagtcagacggatgctgattgtttagcagctgcagaacccttgtcagatgagatcgctggtaatatgattgaaaaccaaattggccagtaccaagtaccgcttggtgtggtgcaagatttattagtcaatcagcaagtctatcaagtcccgtttgcgatcgaagaaccatccgttatcgcggcggctaataatgcggctaagatggcacgagctaatggcggctttgtgactgaacaactgacgcggctgatgactggtgaagtcgtgttagagaagctagttgacttagtagcggctaaagcttggattagtggcaacaatgaccatttatttgaagttgcacgggctgcgcatccatcaattgttaaacgcggtggtggtcttcaaaaaatcacgccgacgattattgacgaccgctttttgaaacttgaattgcaaattgataccaaagaagcgatgggtgccaacattgtgaacacaatctgtgaagcgatcgcacatgctgttcaagaacagttgggcggcacccttttattgagtgttttgaccaatgccgcgtttgaatccgtggtgaccgcaagtgtgacgattgatccagctaccttaacaactgcgacgcttgctggcaaaacaattgccgaaaagatgattgcggcgagtgactttgccaaagtggatgtggcgcgcgcagcaacccacaataaagggattatgaacggcatcgatgcagtggtgttagcgacgggcaacgattggcgcgcaattgaagccggcgtgcatagttatgctgctagaaagggtgcttaccaaccgctttcgagttgggaatggacaactgatcagcaactacgcggtcgaatcgaactgccactgccagttgggatggttggcggatcgattggtattctaccaaccgtgcagattaatcagcgcttgttaaaagttcagaatgcgcgtgaattagccggcattatcgcagctgttggcttagcacaaaattttgccgcgctcaaagcacttgtgtcagacgggattcaaaaaggacacatggcgcttcaagcgaagtcgttggcgattgccgctggcgcaaccgagactgaattaacgcaattattaccattattattgaaagcgacacatttaaatacagcaacagccaccgagctgttagcgcaactgcgtgctgaaaacaaatagattggaagattattatgcaaatcggaattgataagatgggcctttttacgcctaatacctacttagatttagtgatgctagctaacgcgcgaggcgttgatcctgacaaatacacaattggaattggtcaagatcaaatggcaattgcccccctcagtcaagacagtgtcacaatggcggctaacgcggctcttgaagtgttggatgatgataatcgtgattcaattggtttattaattttaggcactgaatcaggaatcgatcagtcaaaagccggtgccctttatgtgcaacgcttattaggattaaaaaatgcccgtgcttttgaaattaaagaagcttgttacggggcaaccgctggtttgatgaccgcttatgactttgtagcggcgcatccagagcaaaaagcattagtcatcggttccgatatcgcccgttatgggctggatacaccaggtgaagtgacacaaggtgctggcgcggttgcaatgatcgttagtgcagcaccacgtttgttggcgttagaaccggcaacggccatccacagtgatgacattcaagatttctggcgccctaattattcaaaagaagcttttgcgcgtggcaaatattcaactgaacaatacatcgaatttttccaagcaacttgggcagactatcgcgctcaaactggccgcacaatctcagatttcaaagccttaacgttccatttaccatacacaaagatgggcttgaaggcattgcggacaatcttgccagaagcaacggaagcagaacaagcacatttattagaccgttatcaagaaagtacattgtatagccgtcaaattggtaatatctatactggcgcgttatacctaggcttcctttcattgttggaacaatcaacgcaattggcagccggcgatcgaattggtttattcagttacggttcaggtgcaatcagtgaattcttcaccggtattttgcaacctggatttgaaaaacaattagccggtgcgaaccacaaagcaatgcttgctgcacgacgtcaattgacgatggctgaatacgaaaatcaattccaagcagaactaccagaagacggtagcgaatatgaaattgatttggcaatggacaacgcgccaatcattttaaaaggtgttaaggaacacgaacgcaattatcaagttagagattaataaaaaaacagctatgtatcctaaaaactgccattaacagtattgttaatggcagtttttttagctatttctgataaaaataacaagaaaataaagtgcgtttgtggcggttaacttctgagtatagcctaatcaggcgaattaccaacaaagttggtgatttgactgatgtagctagacggaagaagatggtttatggcgcacgttttagcgggtcgttattatccagagatggaaagtagcgacccgttttttgcgttcagacgtgcatttaagcggaaggtcggctagaatgaaattatcaaaacatgtttagagggttaacgcatgaatgtcaaaaaacaatctataatgatgcgcttagcgcaacattttaaccgattccaatccgcggcggtctatcagattatgcagcgaagtttaacgttgttatttccatttgtcttgattgggagtatcagccaactcatccagctagcactttttaaccggaatagttttgttgtgaatgtatttcatctttcgaattggttgagtaaacggaatatctttcagatgatgtttgacagcattacgagtttgacgttaggaatcgttgcggcattagcagcgatgtgtgcggcgcgctatacagccaagcactataagcgtgatgaacaattagccagcattacggggcttattgcctatttaatcttagcgttacggttgacgccgaatgagggcttatctttcaacagccagatgttgggaatggggggcttattttttggcctattagtcggctatctgactggattagccttcaaaaaattagggcgacctcatcggcgtgatttaccgctgaatgggtcagcagtaggacgttcattggattctatgtgggcgattttattggtgctcggcgtcattttagggctgagtgtcctgctaaattggttggcgatttcaatcttgccagatcaagtcatcttacgattacaatcactaaaagcaaatcaaacgggtctgcttttcacgttggggactggtttagcggccactagcttaactttttttggattaacgagtatgccaacattggcccaatttgggcgtgagggaatcgcatcttcggccaacttaaactatgcatttagtcatcacacggcttggcacgttccatatccgttcacgttagggactttgtatgaaccctttggtgcgattggcgggacgggtgggacattagccttagtgattgccgttttcatcttcagcaaacaaagggattatcatttgattggtcgatggtcgctgttgcccgttttatttaactttaatagcgcggtccttgtgggaatgcctgtcattggaaatggcttgtatgtgattccattcttattggtaccactggtaaatatgggggttgcatcggcagcagttgcattgaatctcatgccatcggtagtcttcacggttccacttgggactcccggcttattgcaagcgttcatgggcaccaacggtgatttagtcgcgctggcggtgacggtattaaacgttgtcgtcggcgtgatgatctacaagccgtttgtccaattggcagatcaattagcactcgtaaaggaggcggcataaattggccaaattaagaaaaaaaagcctctggttgttagtcattagtttggccttgatcggcggattaatgtggccagctgctcaatggagtcgccagagcgttatgaccttagctaagcgccatgattcacaaatgtcaccggtaatttttattccagggagtagtgcaacccaaaatcggtttgatgaattagtggctaaattgaacgctaaccgcgggaatcggcacagcttgttaaaactaactgtgcatgaaaataatcagattagctattcaggggaaattaaaccgcgggataatgaaccgtttatcgtggttggttttgaaaataataaggacggttacagtaatattcaaaagcaagctaaatggttttcgctcgcgtttaccgcgttgactaagaagtatcaatttaataactttaaagcggttggccattccaatggtggcttaatttatacagcttttttagaagattattttaatcgcgatgatattacagtgaagaagttgatgacgattggttcgccgtataacttttccgaaacgtcgattacgcataagtcacagatgctgacggatttcattaagaaacgtaaaaatattccgacgaacttatcgatgtattcaattgcgggaacggaaaactttgaaaatgatgggattgtacccgcgcgtagtgtagaggcgggaaagtacatttatcaagggcaagtcaagcactacaccgaaattacagtgacaggtgaccaagcacaacactctgatctaccacagaatcaacagattgtggccttgttagaacaatacattctcagcaaaaagaacacccgcaatacacaaccaacacctaaggattcaacaccttcagaagaccaataaaaaaagccccagaatagcagtaaggttgttattctggggccttttttattggcactcattaattagaatgcttggtactttctttttgaaccagagcaccaattgctggcaaattacccaagctatcgattgacttatttggcaagacaatggtgttattttgaccgtctgcgatgtgttccatcgcttcaatattcttatattgaagatagagttcgccgttattgactaagctggcattgatcaaattaatttgatctttaacagcttcggcaattgttcgttcactttgagctttcccttcagcttccaaaatttgtgtttgtttattggcttcggcttctagaatattcgcttcttttaacccttcagctttacgaattgcggcggctttgagcccttcggcttccatgatattggcttctttttcacgcgaagcacggagcaatttattcattgattcttggatgtcgtgggccacttgaattgaatcgatattgacccgatcaacgtttaagccgtagccggctgttacttcgctaagttgttcaaaaagggtttggttaattttttcggtgccatttaaaacatcgttcaagtccatgttcccaataatcccacgtaattgtgcacgggtgtcttggaccatacttagaacggaatctttatttttataaacgtacgcattgacgtcagtgatgtgatatttaatcgtttccgaaatcataacaaccacgttgtctttggtaatgacttcttgttcagcgacttttaaggggatttgtttcatattaacgatttctgtgatgtgataaatgaatggaatgaccaaatggaaaccaggatcaagcgttttaacgtagacccctaagcgttccaaaatcccaacttccccggtatgaatcaaggcaaatgatgaaaagagggtgactgcaacaatcactaaaacaagaatgactaaaatactgatgaaaatacccataataaaaactcccttttgtctggcttaatacgccagaatattgtggtgcgctgtcacgattaaagctaaaggtgtgacggccgttaccatgacgagtaagccagcgctagctggtccttcgacacggtaatgatataagatgccaaaaaaattaacggtgccggttgatttagcatcctgtaaagtaaacgttaaccccactaagcgttcatctaacatattccgcctccctttgttcacattgtatctgattaccaataaaaggcaactctaagtgacagtaacgaacaaaattgttaggtggcttgtctcgaatgcatgaagatagtaaactaagcgtactaaggctggaaatggaggaaccgtggatgagacgaaaagtgacaccgatttttcaagacagtttccaaaagcgctattggcgacaaataattatcggcattatcgcggtagctctgtgtcttggtggtgctatctggtggttgaaacaccgttcggatcgaccaagcgcgacgcaatatccgattctagggatgcaattaagtcagtcagatggttaccaagattttgacgggttaaaaaaggacggtattcagtttgtttatttaaaagcaactgaaggggccagttacaaggatgataatttcgacaccaattacagtcgagcaagtggcactggcttacgcgtgggcatctttcatttttttagttttgatagttcgcctgaacgccaagctgaccaactttttaaagcagttggcagccagacgggtgatttaccaattatgatctatttggattattataacgactatgcacaacaaccgcccgcacaaaagaaaacgcaaatggcactggcgcagctagtgaccttgattaatcaacattatcatcaaaattgtctcattggtggtgcacccagcttattaaaacggtatgtgccacacaaaggagactatccattgtggcaaactacgcgggaacagccaacattggcgactaagaacgggttctggcaatacacaatggctagtcagattccaaacagtgataatcagacgaactatcagttagcagtttttactggcactaagcaacaatggcagactattaaatagaaacggagagaaaataatgattaaacacaaaggctggttattattaatcgcaatcgtggtggttttcatcggtggtagttggggaattcatagctattattacggtggggaagcctactatacacagattgtttcaaacggaacacgaatggaagaaaaggattcagcaggggaaacggttatcgattataactatcaacaagcagcctacaatgaagatggtgttaccaaaaaagttgattttaatggtaataaatcaacgccgcttaaacgaaatgcgtacctcaaattaatcgtcaataaaaataagggtgtggtttcatgggaaaaggttgccaaaaacgaagtcccagataaagctcaaaaaatgttgaacaaataaagaataactaaaaaggccataacgctaagcgttatgggccttttttaatagctattcgattggataatccatatcttcggcttcatcgtaaattgaaacgggccgttgattttcacaagtaatttttaattgatagccgtagtgatcgagaaagaccaattcgttttccgtgagggaaatgacttgaccactcaatggcttatggtcgatttgcaccaacaagttcggagtaatttctaatgtgtgtttttttcgggtttggttgtcattaaaagaccagtgtccagcataaaaagtcgctactttactcgcttgagtcgtccgaactttttgctgatactggtgaatggttcgatttaaaattgcttgtggtttttgaaatttaaaaaatcgcataagtcacaccccaacttactattattctaccacgaaatagttagtttgcggacaattaattatcggacttacgactggttttttaaggaatggttaaagaagtgaatagtggcggaattcttatcagtagaaaaacttttcgataggcttttagatctaaatcccgtatactggcagtattaaataagggagctgattataatgcaaacacttgggattattgggactaactggattacgggacaatttgttgatgcggcccaggaatctgaatcatttaagttaacagctgtttattcacggacggcagataaagccgaccaatttaaaacgaagtatcacgcaccagaagccacaagttacactgacttagacgggtttatgaatgccaatgaatttgaaaccgtctacattgcatcacctaatagtctgcactttgaacaagcgaagcaagcaattttagcgggtaaaaatgtcatcgtggaaaaacctgccttcagtaatccggctgaaatggcagccatgcaaacattattaaagcaacatccagaccaattcttattcgaagcagcacgtcatattcatgaggccaactttaagattgtacaacaagccatcaacgcattaccggcgatcaatggcgcgaccttgagctatatgaaatattcatcacgctatgacgctgttttagcgggtgaagaaccgaatattttctcaccacatttttctggaggagctttacaagatctcggcgtgtatgtcgtctatgatgccgtcagctggtttggtgtgcccgattcagtcgattatcaagctgaattgttaccaactggagtggatggtaaaggggtcgcaacactgcgttatccaacctttaacgtcacgttgatttttggcaaaaccgttgattcctatctaacgtctgaaatttatggtggccaaacgacgattgtcctcgataatgccggcacaatcggcagtgttgaccgctacagcgaaggtgggcaaaagattgagtcactaggggaacaatcacttgctaatccaatggttgctgaggcagaaaatttcgcggcgatgattgctaatcgtgacacaaaacggtatcatgaattattacagctaagtgaatcggtcaaccaagttttatatcaattaagacagtcggccggaataacatttgatgcagattaacatgacggaggcaatacatgagcgtttcaccactatttcaagcactatgggatgaacaaggatttacagaaatgtcacccatccaagaggcagtttatcaaccactgaaaaaagaccaatcaattctaggactggcacccacgggttctgggaaaaccctcgcgttttcattgccgttattagaaaaaattatgccgggcgaagggctacaagtcttaattttggccccttcacaggaattggtgatccaaacacgggacgtcattcaaccttatgccaaggcaatcgactgtaatgtccaagcgattacggggaaggcgaatgttaaacgccaaatcgaacggcttaaggccaaaccagagattatcgtggcaacgactggtcggttattagaattgagcgaacaacggaaagtgaaattccatacactccaagcgattattatggacgaagctgacgaattattgacggatagcgggctttcagaaacccgccatatcgtgcaagaatcacctgccgatgtgcaacttggcttcttttcagcgacatcaaccgatatcttattagagttggaaacatggttcggcgtgccaatcgaaacaatcgacgtgcgtgggattgataagacgggtggggaagtgttgcatgcatttatcccaactggtaacgctcaaaaagtgaacgtcttacgccatttagcacatcaaaagaattttagaggattggtcatttttaaccaatccgcgcaactcttacaagctgcacaaacgttaaaacatcaaaaagtaacgtatgccgcactctcagggcaaggtcgccaaacagaacgccaaaaagcgctcaaagatttccgtgaaggtaagattcaactcttactagcaacggacgtggctggccgtggcttggatatcaccgacttaccttatgtgattaattttgatgtaccaaacgcaaaaatcacttacattcatcgtgctggtcggactggtcggatgggacgcacggggactgttttgacgttgggcaatcaacacgatgggcggaatttgcgtaagttattggcgcctgaatatgatcttgtgacccgttatttggtcggtgaccatttggaagccgaaaaaccagtgacgcctaaagtagcaccagttgctgcaacgaaagcaacatctgctgtaccaactactggtgaagcaacagaaggacaagtacaaaaggctacgccaacgacaagcgcgcgcaaagccaaattagtaccagtccgccaacagccagctgcaccattaaaaccaaaacataagaaaaaccgtaaacgaaatcaaaagaataagggctaccataagaaaaataatgactagtggtctaatccagattgagcgagaaaccttaacaacctgttaaggtttcttttttttggactagtccgtttgtgaaaaggttatcagtaattaattgacaaatcttaggaagcgattacaatataagtaagggttttctttcgcttcgtaaaatgcgatagtggcgaactctcacaatcaggaactaatttttgaaagccttttaatggattggttagtcattctcgaagaaatatctagaccaattaatgaatggttacgaaagtggttcacgatgagatgatcataggaggtgccatactatggcagaagaacagaacttagaagcaatcatgggcttaattatcaacggtgggaacgccaagagtagctcaatggaagcaatcatggccgctaagaaaggtgacttcgaaacagcagctgccaaacttgcagaagcggatgccgctttatcagaagcccataattcacaaacagatatgttaaccaaagaagcaagtggcgatcacatgcaagtgacattattgacggttcactcacaagatcacttgatgaacgcaattactttccgcgatttagcaggcgaagtcgttgacgtttacaagaagatggccggtgtaccagtcgattaaagtttggctaatgaacaaaagggctaggacaaaatgacttttgttcgagctctttttagttaaaagcaacaaatggcacattgaagagaagagtgggaacgggatggaaattaaattaaatttaaaaatgccagctagttatttttatcagaagattctggaatcagtgttgtttgatattaagcaacaaactggggataaactaactgaagcgcagttgcctaattattcgtacgacaagcaatttggcaagaatcgggcgacactgaagattacgcaactgattaaagatcagagctatcactacgaaacgacttctacccgggggagctatcaatcaagttacgatattttcgcgaatggaccgcagtctattgaagtcatctatcgcgaaaatgccaaagcaaatggcaaattacaacaaaccaatgatatgttgatggcctttgtcatgggtttcatgcgtaaacgcggctttaagaaaatgttgaaacaaatcgaaaaagcatatcaagcagaacaataagcaatgactttgagagaaagtaggatgaccagtaatggaataccatcaattagcaccatttcctaaagattttttgtggggttcagcttctgcggcctatcaaattgaaggggcctaccaagaagatggtaagggccgttctgtgtgggatgaatttgtccgcattccaggcaaaacgttcaaagccacgaatggtgatgtagcggtggatcactatcaccgtttcgaagaagacgtggcgctaatggcacgcgctgggctcaaagcctatcgtttttcgatttcatggccacgggtcttaccaaatggtaaaggcgctgtgaatgaggcgggcttagccttttatgatcgtttaattaatacattaattgccaatgatattgaaccaatcgtgacgatttatcattgggacttaccgcaagcgttgcaagccgaatatggcggttgggaatcgcgtcaaattattgaagattttaccaactacgcaggcttattgttcgaacgcttcggcgatcgtgtgcaacattgggttaccttgaacgaacaaaatgtcttcatcactcacggctatttaacagcggagcatccgccagcagtgactgatgctaagcgaacttatcaagctaatcatatggcaaaccttgccaatgctagtgcgattaaattattccatgaaaaaggctatcaagggggcatcggacctagttttgcctacagcccaacttatgcgctgaatgcggacccagaaaatcaaattgcggctgataatgccgaacaaattaacgctgatttgtggatggacgtttatgcttggggccgttatccgaaattagtgatgacttatctcgaacgaaacgggattgcacccgaaattactgaagcggaccaagctttattagccgatccactcgcacatcccgattttatggggttgaattactatcagacgatgacagttacgactaacccactagaaggtggcgttggtttgaccaagcaaaatacttccggtaaaaagggcactagccaagcaagtgggttgccaggcgtctacaagaccgctgataacccctatatgcaacaaactgactgggattggaatattgaccccgaaggacttcgaatcgcactcagacgtattgagagccgttatggactgccggtcttaattactgagaacggtttaggggcttatgacaccttgaaagaaggcgggcaagtgcacgacgactaccggattgcctttttaaaggcgcacgttcaagccattcacgaagctattaccgatggtgtttcggtcatcggttacacgacatggagcttcacagatttattaagttggacaaacggctatcaaaaacgctatggcttcgtctacgtggatcgcgacgaaacagaagaaagagaactaaaccgctatccaaaagacagtttctactggtaccaaaaagtcattaaaagcaacggggaaatactatagagtgcgcagtcgaacgggttggctttgaggattaacagaaaaatacatattatggcgggtttaagccatagtatgtatttttaggttaaccggaaaaggcagttcgaagcagcacgtttaaaataagagtgcgcagtcgaacgggttggctctgaggattaacagaaaaatacatattatggcgggtttaagccatagtatgtatttttaggttaaccggaaaaggcagttcgaagcagcacgtttaaaacaagagtgcgcagtcgaacgggttggctctgaggattaacagaaaaatacatattatggcgggtttaagccataatatgtatttttaggttaaccggaaagggcagttcgaagcagcacgtttaaaataagagtgcgtagtcgaacgggttggctttgaggattaacaaaaaatacatattatggcggtttttaagccataatatgtatttttaggttatccggaaaaacgagttcgtttcaaccctccactttctttttgcctttagaacgcttagaatatagcgtaagaaatcaagacgaggtggcaatatgacaacgcaagaacgacgtacagcaattctgaatgcaattcaaaagagtgcgcaacccatcagtgccaaagtattagcgcaacaatataaagttagccggcagacaattgttggggatatcgccttacttcgcgcacaaggggcccaaattattgcgacagttagcggttattacgaccaaacgcagacgcaacaaacaatgccatatcaggcacaagttgcctgtcagcataatcaggggcagactgaactcgaattgacaacgattgttgaaaatggggggcgcgtgatcgacgtgaccgttgatcatccattgtatggtgaactgaccggtcaactgggaatcggcaccttgacagatgtcaaaggctttatgcaaaaaatggccacaatgccccatcagaaattactttcaacattaaccgacggcattcatttacacacgattgaatgcgcgtcagaacaacgatttaagcaaattgtcgcagcgcttaaacagataaatatttattataatgcataattaggtgtcttgacatctgtaaactctttttgtatgataggaccattcataacataagggagtaatgcgggatgacaaaagaacataggacacttttatgggctgcaggtggtgcatggttgttcgatgcaatggatgtggggatgctatcgtttgtgattgctgcgcttgcaagagagtggcaactcagtagcgcacaaatgggattaattgggagtgtcagttcaattggaatggtttttggcgccgttattttcggcattttagctgataaaattggtcgaaaaaacagtttactttgttccttattagtattttcgattggcaatgggatatctgcctttagtacatcgttgagtctatttctagtactccggttattggtcggtgctgggttgggtggcgagctaccggtagcctcgacattaatctcggagaatacgccaacggcatcgcgcggtcgggctgtcgtattgttagaaagtttttgggcagccgggtggttagttgccagtttactcgcctattttgtcattccagtttggggctggcgagtggtcttattgatcacgtcattgcccgccatctacacacttgtgttacggaaacatgttaaacaagagcatgaaccgacgacgattaaccgtaaggtaccattcatgcaacgattgcgtgttttatttgaaccagcgtatcgccaaagaacaattatgttatggctcgtatggtttttagtggtcttttcatactatgggatgtttttatggctccccagtgtgatggtcttaaaagggttcagcttggttaaaagttttgaatatgtgctgattataaccttggcacaattaccaggctactttgtagcagcatggttgattgaaaaatgggggcggaaacgtgttttaggtggctttctaatcggaacagcactcagtgcattattgtttggcaatgcaaactcagttgccatgttactcgtggccggtgcgctgttatcctttttcaatcttggtgcatggggggcgctatatgcttataccccagaacaatatcctgcacttgtccgtggaagtgggagtggtttagcagctggcatcgggcgaattggcggtgtggttgggccatttttagttggtgcgctaattcagcagggggtatcagtagccgtgatttttacactttttacgggtgcgatactattagcggctggtgccgtgttctttttaggtcaagaaacgatgaacgccgttttaacggatgaataaagatttattaaaatcaactttacaattaaaacaacagatgcgacaatatgactcataggcgctcgtggctcaactggatagagcaatcgcctcctaagcgataggttgcgagttcgattctcgccgggcgcactttgaagcaattgtcgtaaaagcacactagattaactagtgtgctttttaattggtgtaaaataatcaagcagaatgattacgctttcactttcagaaagttacggatttatgatttatattaggtgaaaatatgttaaaatagattcgtattcaaaaatcgcaacgcaaaagttgcaattaatctggaggctttttcatgtcattagttaatggtacagaaatctttaaagctgctcgtgaaggtcattacgctgttggtgctttcaacacaaacaaccttgaatggacacgtgctatcttaggtgctgctcaagaaactaacacaccaatcttgatccaaacatcaatgggtgctgctaaatatatgggtggttacgaattatgcaagaacttggttgaacaaacaatcaagtcaatgaacatcacagttcctgttatcatgcatttagatcacggtaactacgaagctgctaaagaatgtatcgaagttggttacaactcagttatgttcgatggtcatgatttaccattcgaagaaaacttagcaaagacaaaagaaatcgttgctttagcacatgctaaaggcatctcagttgaagccgaagttggttcaattggtggcgaagaagacggtatcatcggtgctggcgaattagctgacgttgaagaagctaaacaattagcagctgctggtcctgactacttagcagttggtattggtaatattcatggtgtataccctgaaaactggcaaggtttaagctttgaccgtttacaagaattagctgacgttattgacttaccacttgtattacatggtggttcaggtattcctaaggaacaaatccttaaagcaatcgaaatgggtatctcaaaagttaacgttaatacagaacaacaaatcgcatggtcaaacgctgttaaagaatactatgcagaaaacaaagatcaagctgaaaaaggcttcgatcctcgtaaagttcttgcaccaggtacaaaagcaatcaaagacacagttgaatcacgtatcgaatggttcggtacaccagctgttaaataattattgttttttcaagagtccaacttcggttgggctttttttgtggtttcatgctagaataagagcaaaataaaggtggggataagatgacagttattgagcaatataatgcaggccttacaactgatgctgatcgaacactcgcactggcaatgcacaccattcttcgggcagtgttaccggacgcagagatgaagctggcttatggtttggttgggtattatcagcctaaagcagtttgctattttggcattaataaacggcacattgggttttatcccactaatcaaccgatggcccattttgcaaaagctgtcgcatcatgtcagaccggcaaagggacactacaattcaaaaaagatgtaacggcattaccaatcgagttgattcaaactatcgcgagttggcaattagaacacgttaataaataaggcttacccaaaatgggtaagcctattttttaatgaccactcgtcattttaatgccgagaattccgattactaataaaataacgaatagccaggttaataaagaaatgtgttcattgaataagatgatgccgactaaaatagctcccactgcgccaattccggtccaaaccggataagcaatgctcaatggtaatcccttcgtcgcacgaattagaaaaccgaagctgacgagcatgccagcaatcgtcagtaatgtgtaattgagcttagtgaacccaccactcattttcatagtcgttgcccaccaaacttctgccaatcctgcaatcaataaatcaacccatgccacacaatagaacctcctaataatatcggccacaaaaaaaggacagccaatcacttcttctttgacctaatgaagtgattaactgcccggtggcgacgattaaattagttatagcatagcaaattttaggttaaaagtgaagcttagccgatagaaccaccaattaaataggtgacgaccatggttaagacgccggttaagacgttgcgtaaaacgcctttgagtcggtttgccttgcctaacgttgcactcgtgtaaccggtcgcgataagggcaagaacaattgaaccgatagttccactgactttgtaagggtatggaattgctaggatggcgatgattggcagcaatgagcctaacatgaatgagaaaaatgatgaaaaggcggcatgccacgggttgaagtaatggtgtaattcaatattgtatttttcgcggagcgtgatgtcgagactgtctttttgcatgaacgctgaagctacctgatgtgcaagtggagtgggtaagccttttgattcgtaagtccgttgtagactggccacttcagcagcgtattcgttttggatggcttctttttgaagccgcatcatggatttctgcgtatcacgttgcgtgctgaccgagacgtattcaccgccacccattgaaaaggcgccagcaagcatgccagaaataccagcaagaaaaatcgtgtactgactttggtgggcgctcgcgacacccactacgattccagctacagagataatgccgtcatttgcacctaagacgccggcgcggataatgttcaaacgttctgataaatggaaacgatgttcaagtggtgcactggcggataattctttcataatggcggactcctctggttgatttaacttcattatagctaattgagaaggattatcaattgtttttgagcaattgttcacaacaaaaacattgtataaaacctgttataccagtacatacgaatcattattactaacgaataatgatatagtgaacaaaaagtatgccaacagtctagcacatcaaaaagggtcgcaacaaaaattttgtcgcgaccctttcgaattataaatgtgtcagtgcttggtagtagaagaatgccgtgattgcggttaagactaaaccggcaacgcacacaatgattagaccaccaatcgcttgtttctggtaggcgctataggcggttagtccaatgaagaaggtggttagacaaacgcagacgccaaggagcatgagccatgtaatcattagtcagcccagtcaccgtttctgaaaatggggacaatctgaccgtcgtgcgttaagccatcgatgttcatttgactagaaccgaccatgaagtcaacgtgggcttgactacggtttaaaccagctgcttttaattcctcttcagacatatctgtgccgccttcaattgaaaaggcgtaagcagagccgagtgccaaatggtttgaagcattttcgtcaaataaggtattgtagaaggtgatctttgattgtgaaattggtgaaggatctggtacaagtgcgacttcacctaggctcttgaccccagcatcggtttgtaagagtttttgtaagacatcgttgccttcttcagcggtggctttgaccactttgccgttttcaaaagtaaattgcatgttattgagtgtgttaccagcgtaacttaatggtttcgtagaagaaatgtagccatcgacgttgttggcatcagctgctgagaaaacttcctcagtaggcatgttagcgacgaatgaacgaccatcactactacggctaggaccacccatccagatgtggttttcaggtaacccaattgtgagatcagtgccaggagctgtgtaatggagtgctttgtattgcgcagcgtttaattcagcggctttggcttgcagtttcttgccatgttgttcccaagcaaggattgggtcttctttatctacccgggttgttttgaaaatctctgtccataacttatcagttgcggcttgttcgtccatatcaggaaagactttctttgcccaagcgggactagctgcggcaattacaatccaactatttttgttggcttgtgttgcttggcgaactttaagcattgcttgaccgtttgccttttgaacagcagcgacccgatcaccatcgaggcccttaaggttatcaggattgctcgacatcaccgaaatccgtttggcgttatttgctaaccagtaatcgtattcttgtttctggaagtctggcacgttaacgaggcgatcttcggctttgtgttgcatattgatccgatcgatgtcatcatcttgccatttgataatcacttctgctgctccgagatcgtagcaagcagctgtcatatcacgggctagttcagcttgatcaacagcgatttgtaaaaccactgtatcaccaggttggacgttaattcctgttttagcgactaaagcggcgtatttttcaagattatgttggaaagtagtcatcaaaaattcctccttaagggcgatttaatatgtttatcatagcacatggcgatttaaaaaactcgtaaaatagataaaaacgttttcatgttatttaattttatggtagagtgacagtagataatattgaaaaacggattgatcggttaaggagtgggaacgatggcacggacaaaacggattaaagcggagcaaattctggataaagcatacgaaatggtattagcggatggtttaaaagcaattacagcgcgcagccttgccaaggcactagactgttcgacacaacccatctatttagaattcggtaatatggccaatctcaagcaagccattttggaacaagccaaggcgcgtttggtgtggtatgtcagtgaagaacaacgaacagatgatgccttagtcaatctcgggattggctatattcgttttgctacaatcgaaccagaactttaccgtgcgttatttattgataaccactttggtaaggatgaagtacaacttttcatggggcaattgacgcaaactagattgcaggactatcaaccgttaaaaacggttagtgagtcagaacacgaacgcattattaacgaagcgtggatcattattacgggtttggcgaccttaacgaatgcgaagttggtacactatagtgacgcagaaatagacgcgatgctcaagcgaatgttgaagcaatgtttttaaaaagagacacctaaaaaggcgtcctttttaatattcagactgttattcatttgtaaggtggttaaagattggcaaatctttagaaaacatgtagtatagggggtaacttattaaataataggacgcagctttgtgtctaaaattaaagtaatgactgtttttgggacacgaccagaagcaattaagatggcgctgctagtattagcattgaaagaatgctcagatgaattcgaagctgtgacagtggtaactgcccaacatcgtcaaatgttagatcaagtgcttgaaatttttaaaattaaaccagattacgatttggacgttatgaaacaacgacaaacacttagtgaaattactagtaacgtattaatgaaccttgataaagtgattgcaactgaaaaaccggatatcgtattggttcatggggatacaaccactactttcgcagcaagcattagtgcattctacaatcaaacagcgattggccatgttgaagcaggactaagaacttgggataagtattcaccattcccagaagaaatgaatcgccaattaacagatgtactcagtgatctttattttgcaccaaccagtcaaagtgaagccaacttattacaagaaaatcatccacaaaaggctatttatattacagggaatactgcaattgatgcattgaagcaaacggttcaaagcgactacaatcattcaatcttggatgttgttgatgctgacaaacgaatgattctagtaacaatgcatcgacgtgaaaaccaaggtgaaccaatgaaacgggtcttcaaggtaatgcgccaagttgttgaaacccatgatgatgttgaaatcgtctatccagtgcatttgaaccctgttgtgcaagaagcagcgcaagatatcttaggcaatcacccacggattcatttaattgatccattggatgttgttgatttccacaacttagctgcacggagtttcttcatcatgtctgattctggtggtgtgcaagaagaagcaccgtcattaggcaaacctgtgttggtcttacgggatacaactgaacgacctgaaggggttgaagcaggcacgttgaagttggttgggacacaaccagaacaagttcatgatgccatggttgaattattagatgatcaagccgtatatgaagcaatggcccatgccaagaatccatatggggatggacaagcatctcaacggattttagatgcaattgcttatcattttggtcaatcaaaagaaaaaccagaagcgtttaaataatgagcattgaaaaagccctcgaccattatcattttgactgataatggcgagggctttttttgatgagataaacgtgcggattcaaactgttttttgtcttaatactcagttgctaagtgcaaccaaacgcactttatttcttttctttcacaatatacactggtctgtttttaacttctaggtagattttgccgatgtatttgccgacaatccctaggcataggagttgtaaaccgccgaccattaggataactgaaatgagtgatggccaaccgcttgttggatcgccaaaaatcaaagcacgaataacgatgaagattaatgcaagcagggcaatcgcgaatgagaaaaagccgacgaaggacgcaatggctaatggtgtttctgagaaagttacaatcccatccaatgaatatttgaagagtccccagaatgaccaactggtttgaccagcaacgcggtcttggttcttatattctaagtacttggtgtcaaagccgacccaactgaaaatcccttttgaaaaacggttatattcagacatctctaagatggcattgaccatctgccgagtcatcaagcgataatcacgagcaccatccacgatttcagtttgtgaaatccggttgataatcttgtaaaattgtttagcgaagaacgaacgaacggggggttcacccgcacgtgttgtccggcgagtgccgacacagtcataaccttcgacttcaatgccgtgaatcatttcgggtaatagttcaggcggatcttgtaagtcaacatccatcactgaaacgtagtcgccagttgcggcttgtaagccagcatacaaggcagcctctttaccgaagttccgagagaatgaaatgtagtgaacgtgttcagggtcttgtgcctgtaacgcgcgcatttccgccaggctttcatcagcagaaccatcgttaacgaagatgtattcgatgcggtggtcggctagagtagccgctactttctcaactgctgcgtagaaaagcggaattgattcttgctcgttataacagggtacaataattgaaatcgtcttagtcatcttaatcctccgaagtatctttgaaaatccatttgctaaatacatagttcgctaaaatcacgataatctgatctagcactttaacaagcatgttgggccataccaataaggaaatcccaacaaacataattgccgtatccattataaatgatataccacggaagaaaaagaaactagccatttcgcgggaaaagtcctttaaagttgtatattttgactgaaagacccacgttttattggtgaaaaaggcaaatagcacggataagaaccaggcaatcgtgttgctgacgagataattgatagttgtatagtggtctaatccgaagaaaacgaccatgttgactagggttgttaagacaccaaagaccaagtacattaattgttcccagtatttttgaatgagttgttgaatggctttaatcattgtgacctcttttcaaaatggcattgtatcgccggagaatccgaccccggagtgccatttgttgttctgtttttttgaaagtgtagcgggtggtgatgtagttgacaatgccgacaattaactgatcgataatcttggcggtcatactctgccaccctaagaaggagatggcgacaatcatcaaaccgttatccaagaaaaaggatacaccacggaaaaagaaaaacgaaagcacttcacgacacacagcgccaaacgtggtgtatttggattggaatacaagcgacttattggtaaaaaagccaaataaattcgcgacaaaccacgccattgtattggcgagtaaatacggccaaataatggtgtggcgaaatacccagtaagtaaaaatattaaccaacgatgctaaaaaaccaaaaatcgtataggtcaaaaaatcgcggtatttaaacactaaccgtttaatgaaagccataaagacagctcctagtttgatttattaaggtctaaaagaccaaaagaagggccgcggtaaaaagggacgtaaccgcggcccatggaagattggttgaaacgtgcttgttgaaacatacttctgcgcttaaccaaatttaccaaataggtgattgcatcacctattcggcaaatccagttaatgctcaaagcataaccgtttcaaacgcactctgccttgaaacgtgctttataagctagtatcctgtgccggactaggttagtgctcggatactgaccgagcttatagtgcactttgttttgcgacaatctctgatacgaatttttcaagatgttcgatatcttctgcttctgctgacagatcgactttgacaacgtctgaaccctttgttgcgccggtttgttcgaagacggctgcgaaatcatcaaccactttacagaagtcatcgtagaacgtatcaccggagccacagacaccgtagactttaccagttaaatcaatatccttgagatcttcgtagaaatcaacggcttcatcggggagatcgccatcatcgccataggtgtagctgcagacgatacagatatcgctgtcttcaaaatcggcaggatctgcttgagagatttcagtggtttcaacgtcgacgttcaaactttcgagggcttcttcaacgatttcggcaatttcctcgttattgccggtcatacttgcatagactactttagcagttgccattattgggacatcctttcacgtacgcggcgctcagtggccgcaattaacgaattatactataaggcattatagcaaaagccccttattaagaaaaggttcaacggctctttcactgttaattgaactaaaaagcgacgattcgtccattttaatggcagatagcgtataatatagaaatagatacaattaaaggctacaatggtaacaatattggaggtttcattttgattacattaaaatctgaacgagaaattaaagggatggctgcttctggcgccattattgccggcgttcatcgcggtttgcgcgacatcatcaaaccaggtatttcgagctgggtaattgaagaattcgcaaacgactacatcgaacaacacggtgccaaagcatctgaaaaaggctttgaaggctacaagtacgcaacttgtgtctgcgtgaatgaggaagtggcacatgccattccacggaagaacttaattctaaaagaaggcgacattgtcagtgtcgacatgaccgttaacttggacggttatgaaagtgattcttgttggacttatgcagttggcgaaatcgcaccagaattacaaaaattaatggacgatacgcgcaaagcactttacttaggcattgatcaagccgttgtcggcaatcgcctaggtgatatcggccacgccatccaacaatataccgaagttgaaaacagctacggtgacgtccgtgaattgattggacatggtattcaaccaacgatgcacgaacaaccaaacgtgccttcatacggtgaagcgggcaagggcttgcgccttaaagaggggatgaccatcacaattgaaccaatggtcatcttaggtggcacatggcacatcaagtcaaaagaagtccctggcgaagactgggaatattacgtctcagcagatggcacaccatgtgcgcaatatgaacacacaattgcgattaccaaagatggtcctaagattctaacctcacaagatccagaaatggatgctaaatatttactataaaattagaaaccttctctaaaatgagaaggtttctttttttgctttcagaaaactattagcccatagttaattcgtgtataatagaaatgataaacatgccttaagaagtcgggaaaataagcctttcaggtagaacgactaatgtgtaaaagagaatttggagtgacatatgacagtagacaatcaaaaccagttaccggtggtaaaacaggacttatccagacggcagaagttgattgctgtggtgaagttaatgatgttgcgttcatcagaagcaagcattactgataattcgaaggtaatcgcatattattcgttattatcaatcttcccactattaatcgttatcgggaacatcttaccgtacttccagttagatgtaatgagtgtggcggattacgtccaaacggcggtgccgcccacgatattcgacaagattatgccagttctgcagtccctattgaagaaacgcaatgatggcttattgtccgtcgggatcttggggacgttgtgggcagcgagcatggggattaatgccttaaaaaatagtattaaccgcgcgtatcgtgttgaaaaagttcagaactttgttttaaaacgcctaatttctttggggagtacattgttattacttctattattagtcggtttaattgttgtttttacattcgggcaacaagttttggaattattagtcccaatctttaacattcctaagacatacgttaatatttttagtagtttaaaatggccagtgacggggatcgccttgttcctactgctgattttcatctatttcttcgttccgaatgtgaaaatgcgattgcgaagtgttttgccaggggcagcactgacaacggttggctggttaattcttgcacaagccttctcattgtatattcgttacttcggcacgtcatggaatagttacggtgcaatcggtgcggtgattatcttactcttgtggctgaattattccgcaacgattctgatggttggggctgtcttgaatgttgtgattgaagaagcactgcatgggcatgttaacgccagtcgcggtaaggttcatgacttcattgcgcgtcggcgcgatcaaaatgaatgacagccgaaaaattaatgagacaaagcacaaatatgaattgaaacgttaaccaattatataggttgtaagaattcgggaatcaaccggatgattacaacctatttttagtctctaaaattaaaattatttatctcaaccgatatgtcaaactaatgtttttacatatcggttttttgatggacttagatttcgtaaaccactttcactttcgatactttaaaaatatttaattatttaaaaatcttgaatattgaattaccgcccaatgttaagggggttattcacaatttagtgtgaaaactaagtgttttttattaaggtgtattccagaaaaagatttccttggtagcgtcaagaatcttgtgtaaatgaaatgccttcgtacatataatatgtatctaacttaaataaatgatgcttccaaggtgtcctggagtcctttgaaccctcggtggatccgcttcagagacttctcgttataaacattaaactgagaaaccaggaagcgatccagtgaatcttccgttggaaattgttctttgtggcgattttaaatcgttagaactgaggccttttttagtttagttcgttgtctctgtatctgttggattggtattcgctgtataattcgtaccggttgtagtgtcagtcgtagcagcagtaccagttgtgtttgctgtgtaattatttgtcgttgttgctgcggtgccactgcgacgactactgtagccactagttggatttaattcatcagcggtgctataggtaattgaaccatagccgttgttataacctaaatagtggttccagaaagtttcgtagttccgggcagaaccgccaatcccgaattcatagctagttgcttttggcgtccagttgttataaagcgaggtgacggttgaaccgttcaagttctgtgagctgccgttgattgaaaccgtgccaggtaattgaccagttaatttcaagactttgctgcttgtgaccgtacttggcttttcatgatcatcttccaaacgcatgaggcttgggttgatctgataaacgctgttggccaattttgaccagtatctttcattaatctggcttgagttgtcagttaagttacgaccagtactgtcataacccatccatgaagcgagggtgatcccaggggtactcccgataaaccagatatcgcggttatcatttgaagtcccggttttcccaactaagttgttggtattaaagtagagttgatcgtaaattgaagtagcagtcccatctgttaaaacgccggctaacatttggttcatgatgtacgatgttgcttttgaaaagacgcgtttcttcttagcgtgatgttggtaaatggcattaccggcgggatccgtaatcttttcaatcacgtaggcgtcggtatgttcaccttgatccgcgaaggttgaaaatgcactggcctgttctaagacgctgaccccatcactggtcccaccaagtgaaatccccagttgactgtattcatcagcggtgaggttgatgcccatcttactcatgtacttagaaggatctgttgtgttcttcaaagcgttataaaggttaacggttggaatattcaatgactgggctaacgcttcgtcagctggaatgaatttgttctggatcgtgccaccgtaatcggttggtgcgtaatccttgaagttggtcttgaaatcggccaacatcgttttagaaccaatcagtttctgatcgattgctggaccatagactaacaatggcttgatagttgaaccaggagaacgtttggtcaacatgtagtttgtttgtttgagtgagaaatcacgtccgccgacaaaagaaatcactttcccagtgcggttatctaacaagacgctcccgttttgaacaggggacgaaacggtcttttgtaaccccgtttcttcgtcagtaacggtatcggtataagtccgtccgaatgttgcgccctgttggtgaacaaccccttgcatggcatcgtaaatttcttgatcgatagtactgtgaatttgatagcctttagtgctgagtaattcagttgcttgtgtttcatattgtttgtagagatttggatctttgttaagtttggcagttgaaacattggcttctttggctaactgtttggccataatatcagttgcttgtgtttcaagtaagttataaacatagccataactcttcgttgtttcggctggatcggcttttggttggaattctttggttaagtcgactttcttagcggctttgtattcagcctttgtaatgcgatcgtcacgatacatccggaataacacggtatttttacgatctagaccatattttaagtattcaggatctttaagggtgccgtcttgatcatatggtgtatagacggaaggactctgtggcagaccagcaatgtaggcagcctcggctagagaaagatccttagcatttttgccgaataggcccaatgctgcttcttgaacaccagcgatattttgtcctttattgttacggccaagagtggcaacgtttaagtagtcttgtaagatttcttttttagtgaaatacttatcgacccgcaaggcgagcaagacttcggttgctttccgtttaaaggttacttgggaggttaaaacctgcatcttaatcaattgttgcgttaaagtcgagccaccggtttgtgaaccaaacccagtgacatcggaaataacggcccgcaagagtgctttggggacaaccccatcgtgtttatagaaatcctcatcttcggttgcaacaatcgcatcctttagataaggggacatctcattgatgttgatgggagtccgaattaagtcggttttgattgcgccgaacttattgttcttggcaaagtataaaccggctgcttgatcggtattatcaagttgttgctttagcacttgataactaggaattggttcggatttcattaacgcagcaaaatagcccgcgccaattccagcagcgagcgccatacagattaagccaattgagatcccatagagaaagatactcttaatggcttcaaagaagacgttaatcttaaaagagagtggtgattggctcaactcttggatgtaggctcttttttgttccttagttggttgtgcagaacgtttatcgggtaaatggagcaaatgtgcgagtctgtctttagcagatgtcaatagcgttgagaccttttgtctgctcgactggagcagtgctcgccatcgactggaacggtgctctggatcattcaaataataacgccaccttttttctcatactgtcccatattatataatagttcagcgcattatcatacccgatttcggatttgtaagacaaatgaaaaatatccagaaatgcacggcaatcaatgaatatagtgcaattggttaaccaatttgaatcagcagacacaaaaaggggggcgtttgctagcgattaaaagtaagcttttaacgaaatgccgtgaaaacgctaaacgttaggtataccaattatttagcgcgttttttagcgtcaaaaggcttgcaattgaaattttagccgtttataattggactataccaatgaacgacttgaatttttaaatgatgaggagataatcatgatgaaaattattaaagtgaaagatcaagtagaaggcggccaaaaaagctttgaaatcttcaaagaaggtttagcaaacaacgctaaagtattcggtttggcaactggtagttcaccaattaaattctacgaaacattagtggctagcgacttagatttcacaggttgcacatccgtgaacttggacgaatatgttggcttatcagctgatgacgaccaaagttaccactatttcatgaagaagaacttattcgacaagaaaccatttactaaatcatacttaccaaacggcttagcaagcgacatttctgctgaattaaaacgctatgaccaagtgattgctgataacccagttgatatccaaatcttagggatcggccaaaacggtcacatcggcttcaatgaacccggtactgcgtttgacagcaatacacaagaagtgcaattaacagaatcaacaatcaaagctaacgcacgtttcttcgaaaatgaagcagatgtaccaacaaaagcaatctcaatggggattggctcaatcttaaaagctaagaaaatcgtcttgttcgcatatggcaaatcaaaagctgaagccatcaaaggcacagtagaaggcccacaaacaacagacgtcccagcaagtgcattacaactacacgacgacgtgacaatcatcgtagacgaagcagcagcaagcttgttaagcaaatagagtgcgacagcaggcggttatgctctgaggattagtggcatatcgtgaatgagcggcaaagccgatcgttttcgatatgtaactaaccggaagagtatgcctgatggagcccgtttcaaaataagagtgcgtttgaaacgggtatcttctgagcattaactggatttgacgaattgacgatgaaatcgtcgatttgccaaatttggttaagcgcaggaagatgtttcaaaaagcccgtttcaaaacagagtgcgtagccagccgggtatatcccgaggattaacacaggatggcgaatgattgcgtcagcaatcgtttgacattcagggttaaccgcaaggatatggatgacgaagcacatttccaccacaaaaaaatcccccacatcaaatcacgatgtgggggattttttgattgcattatttcaatgttgccatcactttagccattgcggcttgttgataggcgattgctgcttttttagcaaccgcttgttgttgatcagcagtcattgctggattggcttgcatagcagccatcacagcttgtttaccggcattttctgcgccagttttaagttgtgcttgttgaccttttaatgttttagcgagttgtttagcttgaacatcacttagaacgaaccagcctttagcaaccttaaatgtgttgtgacgacttacgaattcgtggtcgttaccagaaattccgaaccagaatttagccgtattattttgataaacgcggtatttggtggttgtcactaagactgctttatcagcatttttttgaacactgttggttgtcttttcagtttgggttgctttgggtttactttggttggcatcggtccgataaagatagactttttcagtgccgttaccaagtgggtgatagagaagcattgacatgcccttcgcatctgcgcttgaaacgagcgtgtgcgtcttagtttcggtcacagttttcattccgtaatgattgtgatcattttggacgatgaaaacgagtgaagcgataaatgtgagtccaaagatggtcattaagattggtcgccacatcttttgaccgaaaatcgatgaaaagaataatgcgagtgtgctgataacgagtgtaatgacgatcatgccttggcacccccattaatcgtagatttctttgaagagaggaagaatgtgatgatgaagccaatcacacagaaaatcacagcaacgatgaaggctgcgtgataaccagaaagggtggcatcaatcatcttatcgcggaaggccaatggtaatgtcttgaccatgtgtgtgcttggcatattgccttttgtaacactagaaagcacactgattaagatggctgtcccgattgagctggcaacttggcggaaagtattattaacagctgtcccatgactaattaagttcattggtaaagcgttcattccggaagttgtgacaggcatcatcaccattgaaatcccaaacatccggacagcgtataacacaacgatgtagatgattggggtagtagctgttaggaagatgaatggcgcagttgcagccatcaataagaacatcccggtcattgctaagcgtttggcaccatatttatcaaaaatacggcccgtaattggcatcataatccccatcatgagggaaccagctaataacgttaagcctgaatggaaggcagattcgccacgaatgttttgaatgtatagtggcaagaccatttcggcaccgaccatcgccatgttcgtcacaccacttaaaatagcggcaattgtgaagacaggtgatttgaaaacgcggagttccaagaatgggttttccatcgtgagttggcgccagatgaataaagcaattaccacaacgccaattgctaaggttgtgagaacgagcgcatcgccccagcctttatcgccaacttctgagaagccataaagcaagctcccgaagccgacagttgataaaataattgaagggacatcaattttaggttttgaaagttgaataacactcttcatttggaaactagcgaggactaagacgagaatcacgattggaataatcatgccgaataaaacacgccagttgtatgaatcgataatccagcctgaaagggtaggccctaaagcaggtgccaggccgataacaatcccggccatccccatggctgttccccgtttttcaggtgggaagatggtgagcataatggtttgcaaaatgggcattgaaatcccaacaccagcagcttgaacaagccggccgattaatagagttgcaaatgagctcgttggtgcgatgtaacagataatagtcccgattaagaagacagtcattgctgacatgtagaggacttttgaattgaatcggttaattaaccaagcactaatggggatcataatcccgttgactagtaagaaaccggttgtgagccattgaacggctgaggtggacacatcgaatgctttcattaatgtggggaaagcagttgataaaatcgtctggttcaagacggtacagaaagtaccaatcaataagaccaagactaagactgtccgattatatggtttcccatgaatatctaatggtctagcgtctgacaagataaaaatctcctttgtgtgtttttgttgatgcgatttattagtttagacgcatttggtatatttgtcaagtaagttgacaaaggtgttatttaacttgacaatcccaatagattatctataatgaaaaataataataggaatggagtggggacttgcaaaaagacctttttttaaagttaatagatacggatcgattgatttttgggattagtgaagtttgtaaaatggcgggggttacaccgcgtcaactccgctactgggagcaaaaaggatacattaaagcgcgtgaattggatggcaataaggcccgcgagtacgacgcgcaaacaatgattaaggcgatctttatcaagcatttcttagatgaaggctacacgctaggggttgctgtacagaaaattcaaaaacacatggataacatgaaggttgttcgttcgataattcgggaacattttgaggggattgaagagattgatggcgaaatggctgttaatctcggttacttcgatgaaacaaagcaacaaatcttatacgcaattgtcaaagatgggcattcaacgtttaagctgatgcctgctgataaatgaaggcaatcaaaaaaacggtccaaagcgattaagctttggaccgtttttgattgctaaatgtgttctatcagccatatccttccggttaaccctgagccgcaaacgattgctacgcaatcattcacaactttgtattaatcctcggtggatacccgacttacgtcacactctaccttgttaatctgtaaattgcatctgcatagattgcaatggcattcatgatatcttcaatgtgcatatattcatttgcttgatgcatcacattttcgcgttcttctggtaaggcaccgaaagcaacaccacgttctaagatacgaccatatgtgccaccaccgataacttgttcgtgacctttaagaccagtttgttcttcgaagacgcttaataatgttgcaaccaatggatcgtcaccaggcacgtaatgtggttcttgtgcatgaccgtcaattgttacgtcagcaagatcactaagtgtgtttgctaaaccgtcgcgtgtgctttcagcagtcacacctttaggataacggacgttcaagagcactgttgctacaccatcttgtgtgtagttgaagactgcaggacatgctgttaagtcgcccatcacatcatctgtgtggttgatgtttaagaggtgcccacgtgaatcttcgtgcattaagcgggcaattgttccgatgtagttgccacctttagtatctaaggcaaagtcagctaagaaagttgccaagtgtgttgcagcatttacgccggcttttggttcttgagcatgtgaacctttaccgattaagtcgatgattgtttggtcaccgtcagttgtgattgtcccttgtaacttgtggtcggcaacataggcgtcaaacttagcttggaaatcagctggcattgcacccgttaagatggctttagctgtttgtggcaccatgttggcgcgtaaaccagatttgaagctaaccaatgtcatatcgccatcagcaccgtcaactggtttgaaagtcatgaggtatgacacaatccctttttcaccattgatgattgggaagtttgcatctggcgaaattgcaaagtcaggttttggttcaacttcgaggtaacggttgatcccaacccattcactttcttcgtcagtcccaacgataaagtgcacttttttgtttaattcgataccgttgtcttttaataatttcaaagcataatatgctgcgattgaaggccccttatcatctgatgaaccgcgggcataaatcttaccgtctttgatcactggttcaaatgggtttgtttcccaaccgtcaccggcaggcacaacgtccatatgacctaaaatcccgaatatttcgtcgccactaccgagttcaatgcgacctgcaacgttttcaacattctttgttgtaaaaccgtcgcggtcagcgattgctaagaattgtagcaaggcatcgcgggggccagggccaagtggtgcgtcgtcttctttatggtcaacgtcgcgcgcactattaatcttgagtaaacttgttaagtcagcaagcatttgatccttatactttgctgcttcttgttgccaattcaatgtcattgcagtcccagctttcattgttaaattttaaccaaaaaacggttaattaattattaatctattcacattttagcatattattacagatttaaaaagcgcttgccattaaaaaataaaaggttcacaaagtctccatgaaccctttaaggttagtgcttctttaaaatccgaagtgcgtttaaaatcgcgattaacgttaccccgacatcggcgaaaacggcttcccacattgtggcaattccaaaggcgcctaataataagaagatgcctttgaccactaatgcgaaaatgatgttttgccaaacgatgcggcgggtgtacttggcgatcgaaatcgcagttgctaattttgtcggttcatcggacatcaagacgatatcggcagcttcaatagcggcgtcagaacctaacccgcccatagcaacgcccacgtcggcacgggctaaaacgggcgtgtcgttgattccgtcaccaacaaagacgatttttccgttggtagcgcggtcttctgtgagtttggcgacggcggccactttatcttgcggcagaagttcgctttgatacttatcgatacctaagacggcgctgacttgttgcgcaacgggttggttatcgccagtcaacataattgtttgatgaatcccggcgtgttttagctgcgcgacagccgtttgtgcatctggtttgacggtgtccgcaatgacgatataccccaagtagcggttgttgtaagcaacatggacactggtgcccacttcactaggtgtgagtgttgcgatgccactggcttgtaaccaactagccttaccagcttgtaaaagttgtccgttgagttgcccgctaatcccgtgaccagcggtttcttggacgtcagataacgtctttgtgagtggcgtttggttagctgctaaaatcgattgaccaattggatgggtcgagtgttgttcgacaagggcagctagtgctaaaagttcatcaggttgttgatcgaccgaatgaacggtggtgacgctgaaactaccttgggtcaatgtcccagtcttgtcgaaaacaacggtttggacatcgtttaaagcttcgagataattactccctttaaccaggatgccgtttttagaagccgttccaatcccagcgaaaaagccgagtggaattgaaatgacgagggcacatggacaagaaatcactaagaaaatcaatgcccgatagagccaatcgccaaatggagcaccgaataaaaggggcggtacaatggccatgatggctgcaatgccgacaacaattggtgtgtagacttttgcaaaccgcgtgatgaagttttcagtaggcgctttttgactgcttgcattttcgacaaggtctaaaatcttagcgatggttgaatcagcataaggtttcgtgacttcaagcgttaataaacctgattggttaatcgtcccactgagtagttcatcaccaggatgaaaggcgcgaggaacagattcaccggtaatagctgaggtgtccacgtaactgtcgccggtagtaatcacaccgtcgagcgggactttttcccctggtttcaccacgatgtgttcgccaacctgaattgcttcgggtgcaacaacttcggtggtgccatcagccgctaaccgattggcgatggttggtttaattgccactaagttagcaattgagcgccgggaatgattaaccgctaatgattggaaatattcaccaacttgatagaataacatgacaccaacggcttcggcatattgtccgattccaaaggccccaatggttgcaattgacattaagaaatgctcatcgaaccattcgccgtggagaatatttttgattgcggtccagacgatatcgtagccgatgactacaaaggcagctaggagcaacgtggttttagctggcgcgcttagagggacaagataagaaatcgccaagcctaaagagctgacgagaattcggatgagatcataattaatcgcatgttttgcgggggatggttctggggttggtgattgttgaatccccacatctggttcaatggttggcaaaagagtagcgagttgttgttcgaattccgtaacagcttcttggccggtgagttcatagtttaatttttgagtggtgaaattgacggagcaacttttaacgttggccatcttgttaacgttcttttcaattttagtagcacatgcggcacaatcgatgccggttaattgaagttgtgccatgttatttaggcctccttgttgagtgaaaagctaaatcgtaatctttactaaataaacaaacatatgagcatatattcatatgctgactataagataccaccaaacacgatagaatgcaatcgagatgatgggtttgggacattaaaaaaagcaccgaccaaagtgaattggatcggtgtcaataggatccttagtgttcgttgacgtgggcgataacttgcgaaaagatattgatgacatggttgtcagctaatgaatagaaaacttccttgccttctttacgactttttaccagtttcgcttgcttgagtgcacgtaattgatgtgaaattgaggattgcgacatctctaacacactgacaatatcgctcacccgcaattcggattgaaagagggcgtacaagattttagcgcgtgttttatcgcctagtattttaaaaagaattgagatgtgatcaagtgtttcttcctttggaagagtattttggacggaacgaatcaattgttcataatcggatgtcataaaaggtgacctcgttagaatttaatggtagttagttgtagagaacgggcaaactggttaaacagttgcgcgtcgactggtggttgttggggcaattgcagtggcagtgctgggttaatcagtaagttggttggccgcaattgttggggaatttcacggtaaaagtgggttaccatcagcgattggtttgggttgaagtcgattaatgcttggcgactcttgaaccaaccgctagcgactttcaaccagacttgattaccaacatagcgcactcctaaaatttgctgttgtgaattggcactaagacaaccggttgtctgggtggggtgtagcgggttattccaagtagcgacaatgttcgcagttggtttaatctgcgccgttttacccaccaataaagcagcggctttcgctgtttcaccgacgttgatgctgtcgctgaggacaaagcggttagtgccaatgcggtagtaagtttgatcggcaattgtaacggcttcggtgatgttgtagatatggcccgctttagccggctttttattgagggttggttcatatggattttcaacggtggggaggtcttgaacgtcattgacttgcccaattgtgtcgatggcttcactttctgcttgatcctgtgcggcctgatagtggcgtcccagtgccggatagttcgtgaccacgccgtcgacatttaggttgactaaccagttccaagtcgcttggttttcagacatctcattccagacatacactttttgatggagataatggagctgtttaatgatggttggggtgacgagggatgatgagatgttaatcccgtcggcgtatttaaaactctcgaatgagatccgctgtaaactgccaacgataaaaatgcggggaatctctggcattaaacgttgcatgttttgcagactagcgagggaaaaggaatggaccataacgcggtcttgcatgtgatattgttgaatcagcgccacgagttttgcttccatgtcctgcggatttccctttttggttttcttggtttcgatgaggaatttcgcatttgggttgttttgatagtgctcaaataattgatcgacgctgtgtggtggttccccgttactcattttgagttcactgagcttggcaaaagtattttgcgaaacaattgcatcggtccccgtgacgcgttgtaagttacggtcgtgggagatgactaagacgccatcttgagattcgtgtaaatcgagttcgacatagttagcgccttgcgaaaaggccatgtcgatactttgaaatgtttcttcgggtgcgttgatggggtcgccacgatgagcgacaacggtaaaaccggttaaaaaccagaaacaaaggcttgttaatactaaaagcccccatcgtgaatgttgctgtgacaaatcaatggcctcctcaattgataaaaactactctttttaagataccattattcctttcaaatgcctacgattgttacagaactttaaagaaacggataaataaattaaaaataacaattgacaacgcttacattaggcggtatattatgtttgtaaggtacttatgcaattacctttttatcaattctctttctctcttatgccaaccactatctgcgggtagtggtttttttgtgtacatattggtagaataaacgtaactgaaatcggattagaataggaagtaacacaatggcggagaagtaccaaacatttgatattattgaagaaattacgcgcttagatggcacaacgtattatgaattggctaacatctttatgaatgggcgtgccgaactagcggctaaccggggatttattaagcaagtccggattttacaactcaacattccgcattcgaatgcggtccaaacttacgaagcttacattaatgaacgttacacaatgcctgcggttgattttgaccactgggaagaatgggaaaaagaagacggcgcagttgcgcaagcctttcaggagattttaaaagcaaatcatattggttaggtgggattgtgaatgatttatttcacagcggatacgcatttttttcacgccgaattattaggtaataatgattttgcgccgcgtccgtttaaagatgtagctacgatgaatgcaacgattattgctaactggaatcaacgggtgcaagctgacgaccaggtttatttgttgggtgacgtcgcaatggtgcccaataagccgagtgcttttgccgaagtcgctgctgtgttagagcagttgaatgggcagctgattattattaaaggtaatcatgataaccgtgcttttttgaaatatttggcgaaacatgatgcgggattatcagctggcaaggcgcattatcaattttctgatgtcggtgagctaattaagatcaatcaccatcagtattttttaacccactatccgttattattgggaaaggtccaacagacgttcaacttgcacggacatattcatcattatatgttgccgattgcagagaatatcaatgtcgggattgatgcaccagagcgcgaattattacctgaacgggtgccgtttggaacaccccttgcggcaaatgagattgaaatcatttttgaacgcaaacaagccgcgctggcaaaccccagccacgactagctgaagggagtaagcaaaatggaaacaattcatattttacacacgaatgacttacattcacattttgaaaattggcccagaatgcggcgcttcctcttagaacatcaagcagcataccgaaagcaaggggatacggtcttgaccttcgacatcggggatgcaatggatcgtagtcatccattgactgaagcaacgaatggtcagattaataccgagttactcaatcaaattgggtatgacggagtaacgattggaaacaatgaaggaatcggtaatagtcatgctgatctggaacatttgtatgataaggcgaatttcccggtattactggctaatctgtatgaacaagcaacaaacgaaaggccagcatttgcgcaatcttaccgactaatgacgaccgatgctggaacgcgggtagcaattattgccttgaccgcaccatttttcttaacttatcggccgaatggttgggaaccgacgactgtcagtgaagagttgccgcggcaattagcggcgattgaaggtcaatatgacatcttaatcgtcctatcacatcttgggattacgactgataagtggctggcggaacaattccctgagattgatgtcgtctgtggtgcgcacacgcatcatcttttagaagaggggctgctggttaatcaaaccttattgacggctgccgagaagtacggtcattaccttggtgatatcacgcttgaactggatgatcagcaccatgtgatgcataaaagtgctcggacggttttaaccgcggacttaccagttgtgaagactgacgcagcagaaattgaaggctacctgaaaaaggggcacgcacaattagccgccgagcatgttgccaagttgccacacgcttttaaaatcaacgcaattggtgaatcagaaatgatgacgaccggtttaaaggcaattgaagaagcgaccagcactgaagctgccgtattgaatactggcttgttcttgcaagatttgcaggctgggattgttactaaagatgatttgcaaactcaattaccgcatccaatgcatctgattaaagtgacgctcaaagggtatgatttgtggcggatggtgcttgaaatggagaaaaaccggctctttttacgcaagtttcctattaaagggatgagtttccgtggtaaaatctttggagacatcgtttatgacgggatagcggttgatatgaaattgcggcgcgtcttttggcatgggcaagaaattgatccagaagccagctatacgttgacgaccgtcgatcattatctattcattccattctttccaacaattgagattgttggcgagaccgagatcgtgttccctgattttctcagagacgcggtcgctaaatatttaagtaaacattatcccttataagggaagaggaggttcgctgtggcggatacgaaaaacagtcccaagattgccaagaaagtgaccaaggcgattgaaaaagaaatgatcgcttcagccaaacaaccggaagtgccacaacacgttgtcatgaagactgaaaccacgcttgagattgataaatgtgcttatgaagtcgttgtgaactatcgtgaaggcttcgacgctgaaaagttgaacgaacgctataatgaagtgttggctaagtacgattatattgtggctgactggggctttgaacaactgcgtttgaagggcttttacaaagcaaccaacaaacgcgctaataaagatcaattaatcaatacgttacaagattatctatacgaatactgcaactttggttgtgcctactttgttttggaacgtcaaggcaagccaatcattaagaatgagaatcggcggagtaatcgccaacgtggtcagcaacggcgtcggcgtcaaaagccaggttttacagaacggaaagtcaccgataacaagcaaaaagtgactaaagaacgccctcaaaaggcggtaaccgagaatcaaaaatcagttaataagcgtcattttaagatccgtcctttggaacacaataaaaagtaaaacgtaattggagttagacaactatgacaaacacagattatgcagggtatttaattgatttagacggcaccgtgtatcgcggccgtgatcggatgccagaagccaaagatttcattgaacgcctacaagcaaaacaaattccgttcatgtttttgacgaacaacactacgaaatcaccagctgctgtgattcagaatttggcggataaccatgacattcatgcgacagttgaccaagtgtataccccttctttggcaacggcgcgctatctattgaatttaaacggtggtacagcgaatggcaaaacggtctacgtgattggagaactcggtttgaagcaggctctatcagatgccggttttaggaccaatgaattcgatccagactacgtggtagttggtttggattatgatgtgacttatcacaagtttgaattagcaacgttagcgattaagcgcggtgcattattcatcggcaccaatgcggatacgaatttaccaaacgaacgcgggctagtgccaggtgctggttcagtgattgcgatggttgaacgggcaacgcaacaaagtgcactctatatcggtaagcctgaaaaaatcattatggaaatggccttagagcaattcggcttgacgaaggaacaagtggtgatggttggcgataactacaatacagatatcaaggctggcttgaatgcagggatggatacgttgttagtttacactggtgtttcaacgccagaggatgtggcaaaagaagccttgcaaccaacgcatatcattaacgacttaaccgaatgggacgtttaaagcgggttagaagtaccactagttgggcggcgttgtatttggcgttagtcagcagtgcgattttaataacgttattgttaagctgggcactttatccgctagtgagtcactacctcgatctagcgagtcaacgggaattaacgcaaccgcggctgatgatgaactttaaccggttaatgggctacttacttgtgccatggcaaccacgcttacaactacctgactttccaatgtcattggatggtcggcaacattttgttgaagtgaaacgcttgtttggtttagcagtagttatttggctagtaacgattggagcggcgattcagcattggcggagtcggcgcaagaccaatcgggtttggcaatacgtccgcccaatgcaagttgctcttgtggtgccacccatattagggtttattgctagtatgaatttcgatcggtttttcattacgttccacgaattattgtttcgcaatctgaactggcagtttgatccaatcactgatccgattatcttagtgttaccggaagtctattttggcctttgttttacactcttcttcattttgttagagggtagttttgcttggctgttatggcgcggtaaacgtgcgctataacgtttggctttttattaagaaaatgcaaaagtgattgctttgatgcatggattcggtatcctaataagggatatatttttaaattgaaaaagagtataggagaaatcgcatgacgcagttaattgattttgttttacatattgattcccacctggtcaacattgttaatcagttcggcaactggacctatgtcatcttgtttgccattatctttgttgaaaccggggcggttatcttaccgtttctaccgggggactcgcttttgtttgccgctgctgctttggcagcccggactgataatgacttgaatgtctggctgtttgctgccttgttcttaatcgcctcaattgcgggtgattcattgaatgaacaaattggccaacgggtcggtttagccgccacgaagaatcggttcttcggcaagtttatcaataccgagaaaattgaagaggcgcaggtcttctttgataagtatggtggtaaaaccattgcaattggccgtttcatgccgattattagaacattcgttccatttgttgccggtgggagccagatggccttcatgaagttcttccgttacgacgtgattgggagtatcttgtgggtgacactctgttgcggagctggttacttcttcggaaacattgctgttgtgcgtgaacatttctcactcgttgtgttagggattatcggggtctcattgattccgatggttatcacagcggttaagagtcaaatgaaaaaaaataatgcttaataaaatactaaaaagtcctgcatcaacggttaaaacgttgatgcagggcttttttaaaacgtgctttagctagcaacttcttccgtttagccacggtttgcaaacggtcggctgtgcggctcattcactaaccgatgctatactcagaagctaaccgctagttaaagcactcttatcgaaacgtgctccataagccaccttcttccggttagctacggccagtaaatcatcgactgcgtcgctaatttactggactaggctaatcctcagaaggtaatcgggcatattgcgcactcttacataatggacgtgctgtgtagtggttggcgtttttctgggtagagattcgttagtaactcagtcacagccattggtgcttcaccaaatccgctggcaattaacttcactttaccagggtaggtagcaatatcgccgatcgcatagatgttcgggatgttcgtctcgagttgttggttaacagcgacttgatggtggtccaatgttaatccccaatcacggagaattcgagtatcagagataaacccatagttaacaaggagtttgtcaattgttagctgctcttgatcggttgatttcatcttatttaaagttaatgcgagttgttggttcatttcggtcaaactatcgattaaaaacggcgtcttaatttggacagttgattgtttgagtgcttcaacgctactttcaagcccgcggaattgatcccgacggtgaattaaatagacttgtttagccactttttcgagcattagtgcccattcaatggccgaatcaccaccgccagcaacggcaacggtttgatctttgaactgcgccatttcttttgcgaagtagtgaatatagtgattttcccattctggatcgtaatcgacagcgagtttccgcggtgtgaaagccccgttcccaacggcaatgatgatgcctttggtgcgtgtcgtgcccttcgttgttttaagaacgaaagtcccatcttcttggggttcgataccttgcacagcagtggataattgcaaggttggttggaaaagtgccagctgttcaattaagttttcggtgagctgtgcaccagagataccactgaaaccagcgacatcatagatttgcttttctggatagagtgttgcgacttgaccaccgagttcggggagactttcgataatctgaacatcggccttgcgcataccagcataataggcagcaaacattccgacaggaccgccgccaataatggtgatatcaaagagatgatttgaatcaagcatgagataacttccttaatagtagatttcttaaattagtatactagaaaaaaataaggaaagcatgtttaatgaaataatcgtagtaatttatgaagcaattcgctatcataatgattgtgagtcaaaacaaggaggacgattaaatgacatatccacaattagaccttgcaaactttgcagggccaacagctacttttgacacaaaccgtggcgaatttacagtagcacttttccaagaccaagcacctaagacagtagaaaactttatcggcttagctgaaaaagattactatgacggtgtgattttccaccgggtcatcaacgatttcatgattcaaggtggcgatccaaccggtactgggatgggtggcgaaagtctctggggccaacctttcgaagatgaattcaaccaagaagtctttaacttaaatggtgcattatcaatggctaatgctggtcctaatacgaacggcagccaattcttcatcgtaacaaacgaacatatcaaccaaaacatgttgtcacaaatgccaggtgctggttacccagaagaagtcattacggcttatgaaaagggtggtacaccttggttagattttaaacatactgtatttggtcacgtcttgagtgggatggacgttgttaataagatcaacgctacagaaacaggaatgcaagacaaaccagttgaagaagttatcatcaatcacattacgattaatcattaattttaatcgaagaggtgttttagatgctagtaggtggaattgaagcagggggcacgaagtttgtctgtgccgtaacagatggaaaaaatgggatacaagaacgaattagtatgccaaccgagacgccggaacaaacgatgccacggttatttgaatattttgatcaattcgatcatttagatgccattggtttggcatcgtttggcccaattgatgttaacccgaaatcaaaaacatatggctcaatcatcgatacacccaaagcagggtgggaacactatgatatcttaggagcaatgaaagctcattatcctgatacccagtttgcttttacaacggatgtgaatgccgcagcctatggtgaattgaagatgggcgctgctgatggacttgatagttgtgtttacttaactgtcgggacggggattggtggcggtgttgttgaacacggtcagattttacaaggttacagccatcctgaaatcggccacatgttaattcggcaacaaccagaagattcatacgaagggacatgtccttatcaccacaattgtttggaaggcttagcagctggtccagcaatcgaacgccgttggggcaagaaaggccacttattgccggctgatcatcaagcatggcaaatggaagctgactatttagctcaagcctgtgtaaatattgctttaatgctatcgccagaacgaattgtcttcggtggtggggtgtcgaaacaagcccaactattcccaatgattcgtgaatcctttaaacgtcaaatggcaggttatgtgcaaacgcctgaccttgatgactacatcgtgcatgttgcattaggggatgacgctgggattactggggcacttttactagcagctgatcaactttagttaaatgagaacctgagggatgtttcctcaggttctttttacatattatagaaggaattgtataaaaggtcttagccgatagcttgccttttactaactggaaggcttaaaatagataggaatattgaaatggaggaaaatatgggttatcgaattggacaaaagattacaggtactgtaacaggcattcaaccatatggtgtatttgtttcattagatgcaacggtccaaggcttaatccacatctcagaatgtggtcatggttttgttaaagcgttagatgaacagtttaaagtcggtcaagtgttagatgtattagtgttagatatcgatgaatacacacataagattagtttgtcgttacgtgcgctacataaagcacaagatttagcaccacagcgtgctaagaaacactattggacaaatcgccggattcatattgggtttgcgcccattgcagaacgattaccaagatggactgaagaagcgatagaagacttgaataaaggtgagaatgtatgagtgctaaagtagccggaacgattatgtataagacagagcaaggacaatatgattttttggtccaaccacaagttgatgcttcttataagatgctggtgaccaataagcaagatgatcaaacaccacttgctgctgtattaattgcaatccaagcacagctaaatattgatgttaacgaattgagattgatcaatttagcgaatattaaccttgaaggtgagaacgtttcgttctttgtctttcagtggggagctcatgagactgatttttataccgaacaattgagaataattagtgaagccggttttcgatttgcgaaccctagtgagttcacggaattactggataagttagaagtcacgagtgtcccgcacttgaattagttcggacaatcggtgaatatctattcaacaatgtacgcttttgaaactttttatatttttattcaaaaaaaagtaaacaatcgcttgacgatgtcttggattgttggtatagtattctatgttgtcagcgagagaaaagctcattgctaacgaaataacgggtcaaacgagattgaataaatattcaaaaaatatttataaaaaacgcttgacagtgtttacaagattaatgtttgtcgtggctcttttttatttaactattcttcaattggccaaccattttgtttcagttgttcaacgaatgcctgcttggctttgcgactaaggagtatttgttcgggttggtaatcaagttcgttggttttaattaataaaccatgtttttggacaataatggtcgtagtcgtttcacggttgatggttcgattatatttaaataccggccgtttaagcgtgatcacgtctgccgtcattgaaacacgatgcccgaaaatgacccatagcgtcaaccaaacggcaattaagccgatgccccacgattgccagtttaagttgatgagttcaagttgtacaattaaagctaatgtatagacgaagccaatccaagaccaaatcgtcacgaagtaagcataatttggttggtagaatgcggtggttgtcttttgcatgagaacactcctttttacgctttgtatcataccattaacctgaccctgctgtcagtgaaaggcggtaaattttaagaatgattaaactttatacggacgcagcaactcgtggcaatcccggaccaagtgcggcgggaattttaatcgtgacaccagagcgacaatatcaactacaagcacctttgccagaacagtccaatcatgatgcagaattttcggcggtcattcttggcttagaacaactagccaatcgggggcttaccacgaaaatactacagattaacgttgacagcaagcttgtctttcagagcctagaaaagcggtatgctaaacattatcaagctgccgtcgaccggattctagcacttgaggcgccctattcaatggtcatccaccaatggattccagagcgtcagaatcagggggcgcaccatctggcccaacagggattacctcatttaactgactgttgataggcttaactagcgctttgagcgtgattttagtaaaataataagcaacgctagaattttggaggagtacgatatggttttagttacagaaataatgtcattcatcatcttcattaatgccttattggcaattattacaattctgagacagccacgcgatattgcggccacctgggcgtggctgctagtcttaattttactacccgtgggcggttttatcctatatatgtttaccggacggggcttatcgcggaaaaagattttccaaagtcaatcgcaaatcgatgatgggctttccgcattggtcgacattcaacgtaaggaaaatcgtaaaaacgacctcttaccgaaaaagatgctttccagtgaagcatccgaaatggtgaatctctttttaaatattaataatgcacccgttttaaagaataaccatgtcaaaatctatactgacgggcaagcaaagtttgacgccctctttgccgacatcaaacaagctcaaaaaagtattcatatcgaatattatacgatctataatgaccgattgggcaatgagttacaacaactattgattcaaaaagccaaagaaggcgtttcagtcaacgttgtctacgatgcttggggctcccaaggcgcaacgcaaaaatggtggcgcgcacttgaagatgtcggtggccacgcgcgaacgttcttcagttcaaaacacacgattaccgattttcgcttgaacttccgtgatcaccgtaagattgtggtaattgacggtaagattggttatattggtggctttaacgttggtgatcaatatctaggccggagtaagaaattcggacattggcgtgatacccatatgcggattaccggcaatgccgtgttagccttacaagtacgctttatgatggactggaacgcgagtgttgagtctgcgattaagttaacttactcggaagaactcttcccagtggaccaatcccaaaatcgtggatcagcagccatgcaaattgtctcaagtggtcccgataaattagatgaacaaatcaaactcggttatctgaagatgattagtaccgctaagaagcgtttatggattcaaacgccctatctagttccggatgatagtattattgatgcgttgacgactgcggcaatgtccggggtggatgttcgtatcatgacgcctaacatgccggatcaccccttcatctaccgtgcaacagaatactacagtcaactcttgcatgcagctggcgttaagatttaccggtatgaagatggattcttacatgctaagacggcggtcatggatgggcatatcagcactgtaggttctgccaatatggatatccgtagtttcaagctgaactttgaagccaatacgtttatttacgatccgaaagttgcagcgcaacttgaagcgatctatcaggctgatatggaaaaagcatccctactaacagacgaaataatcgcccaacagtcaacttggttgaaatttaaacaaaaattttcacggttactttcaccaattttataaaatgttcgttaactcatttttatgatggtgcaatattaaattaatcccaatctaaaaaattttttaaaatctgttaagctttgtccggcgtgcttttgaaaaattttgcgcattagcagggattgactttacccataaatatgtttaacttaagtacaggacgttgcccaagacaatcaaatgaacattcgtaaacgaccactataattagtggtcgttttttgttttatctacaatatgtggtgtttattgattgcatcttccatttcaaaacggtatactatttttatcgataagagaaatacaagggagttaacgattatggcaaatatcacattatatactaagaacggctgcccacaatgccggatgacgaaacactttttagaaacgcacaacgttccttttgttgaacataacatcaatgacgaaccacaatatattgattacttgaaggaacaaggtttccaagccgttcccgttttagaagcggatggcctagaaagcttctcaggttttagaccagcggaattgcaaaaattggcgatttaagcaccatgcattcccagttttaacgggtgaggccgactcttgattactaaagagttggtcttcactttttttaaaccctaaaacagctaatatgactagaaagtggtggcaaggatgtctttaaaagagattaaaaccgaagatgtaacatactatgaattgaataaccaaattaatattccagtgaatggtcaaattccattacaaaaggatcaagaagcactcgatgcctttttggaacaaaacgtacaacccaatatggtgacgtttaaatcacttcaagatcgtctagattatttagtcgcggaaaattattatgaagcagattttttgaaggcttattctctttcattcatggaagaattgaatcaatatttaaaggaccaagacttccacttcaagtcatttatggctgcttataagttctatgcgcaatacgcattaaaaacaaacgacaatggcttttatcttgaagattttaaagatcgcgtttttgtgaatgctctctacttcgcagatggtgatcaaacccttgcgctgcaactagcggatgaaatgatccaccaacgctatcaaccggcaacaccatcgtttttgaatgctgggcgttcacggcgtggtgaattagtttcatgtttcttactccaaacaaccgatgatatgaattcaattggtcggacgattaactcggcacttgaattatcacggattggtggcggggttgggattagcttgtcgaacctccgtggagctggcgatccaatcaaaggcatcgacggtgcagcaagtggtgtcctccctgtcatgaagttattggaggattctttctcatactcaaaccaattaggtcaacggcaaggcgccggcgtggtttatttaaacgccttccatccagatgtgattgctttcttaggtgctaaaaaagaaaatgcagacgaaaaatatcgtttaaagaccctctcattaggcttagtcgtccccgacaagttctatgaattggtgaaagctgatgctgatatgtatttattcagcccttacggtgttgaaaaagaatacggcgtacctttctcatatgttgacatcaccaaagaatatgacaacttaatcgccaacgataacatcaagaaaaccaaaattaaagcccgtgatttagaaaatgaaattagtaaattgcaacaagaatcaggttatccttacatcgtcaatgtggacacagccaatgctgcgaacccaattgatgggaagatcatcatgagtaacctctgttctgaagtcctccaagtgcaaaccccgtcacaaattaataaccgccaagaatatgacgtgttagggacggatatcagttgtaacctgggttcaacgaatattccgaacatgatgacgtcacctgactttggtggttctatcgaagccatggtgcgtgctttaacctacgtcacagatcattctgatattgatgtggtcccttctgtggctcatgggaacgaattggcccacaccattggtttaggtggcatgggtctgcataccttctttgccaagaaccacatgatgtatgggtcagaagaatcaatcgactttaccagtaattatttcatgcttttaaactactggacacttgttgcttcaaataagattgctaaggaacgtcagatgacctttgccaactttgaaaagagtaagtatgctgatggtagttacttcgatcaatacctcactgaagactgggcccctaagacggacaaagtcaaagcgattttcaaggacattatgattcccacaaaagccgattgggaagctttaaaactagccatcatgcaagacggtttataccatcaaaaccgcttagccgttgcaccaaacggttcaatttcatacatcaatgatacttctgctagcttacaaccgattgttaaccggattgaagatcggcaagaaaagaaaattgggacaatctactaccctgccccaggtctttcaaacgacactatgccatattatgaatcagcttatgacattgacatgcgtaaagtcatcgacatctacgcagcagcacaaaaacatgtcgaccaagggatgagtatgacactcttcatgcgttcaacgattccagcaggcctttacgaatggaaaaacggccggactgacaaaatgaccacccgggacttaaacatcttaagaaactacgcccaccacaaagggattaaatcaatctactacatccggacttacacagacgacgaaagtgaagtcggcgcaaacgcatgcgaaagttgtgtaatctagagtgcgtttgaaacggtttgactttgagcattagtctaactcggcgaataactgctataagcagttgtttgacgagtgtaactaagcgcagaagtcagtttcaaaaagcacgtttcaaaacagagtgcgacggcaggcgtttatattttgagcattagcatagggaagcgaattagcgaagtagtcgatgatttgattcactgggctaagcgtagaaagttagcttgaaaagcacgtttcaaagcaagcaccaaatctccactccagctgctcgtcagctggcctacatacctaaaaaagaagcacgttaaaaggagttcatgaacatggcagaaaattatattgcaattaactggaaccaagttgaagatcaaattgataaagcaacctgggaaaaattaaccgaacaattttggttagatacgcggattcccctttccaatgacttagatgactggcgcagtttaccagacaatgaaaaatggatcgtcgggcatgtctttggcggtttaaccctacttgatacgctacaatcacaagatgggatggccagcttaaaagccaatatccgcactcaacatgaagaagccgttttaaacaacattcaattcatggaatccgtgcatgcgaagagttattcatccattttttcaacgttaaacacaccaactgaaattgatgaaatcttcgactggaccaacacgaatgaattcttgcaatacaaagccaacaagattaacgatatctatcaaaacggcacaccattgcaacaaaaaattgccagcgtctttttagaaaccttcctcttctattctggtttctataccccactctattacttagggaacaataagttggccaacgttgctgaaatcattaaattgattatccgtgatgagtcagtccatgggacttacatcggctataagttccaattagccttcaatgaattggataagtcagaacaagaagaattgcaaaactggatgtatgatttactgtacgacttatatgccaacgaagaaaaatacacccacgaagtttatgatggcactggttggacagaagaagtattaacttacctccgttataacgccaacaaagccttaatgaacctcggccaaggcgccctcttcccagatagcgctgaagatgtgaaccccgtgatcttgaatgggatgtcgacttcaactgccaaccacgatttcttctcccaagttgggaatggttatcgcttagggaatgtggaagcgatggaagatagtgattacgactttgattaattaaatgcaatagcgcgccccactaatttaagtgagacgcgctatttttttggttattttttaaattgtttcagatatcgtccggccaataatttatgaaacttaacgcccaacgtcggatttgaggcatcaatatcggcatacatcgccgttgtaatcttgttgagtagtggcactaactggtcgagttctgcctcggtcaaggcgttcacaaacggtggcacctcttgattggcagtttcaatttcttgacgaccggcatccgttaagttaactaaattaacccggcgatcacttgggagcttacttaacgtcaccagctcgcgtttagcgagtttagcgacaaattcactggttgattgaggtgacattcccaaacgcgttgctagttcacgttgcgataagtgatcttcatcagcaagtgccaatagaatcttcccctggccttcgacgattaaatgcgggcgtgcttgtttaacgatatcatcgtagatcttactgagttgttcatattcagctaattttccggcgaccaattcggccttgacactctttgccatacgtcatcttcccttcgctgttttaattagtatacaccattccaaaatctaagagtagcaatccttgacattttaatcaggtgacctgattattaaatgaggaggcaatattatgtgcagtgagcatgtcattgaagtaaacaatattcaaaaagcatttgggaccaaaaaagtggtgcgttccgtttcgctagccgtttctaaaggtgagattttcgcattattagggcccaatggtgccgggaaaacaacgctcttaaaaatgatgaccaccctcctacgaccagatagtggcacaatcacattaaatggctttgatacgataacacaaagccgccaagtgcgccaacagtttagtgtcaccaatcaaacagcggcaatcgatcaagacttaagtgcgcgcgagaatctccgcttatttgggcggttaaatgggctcagtgccaaagcgagtcgaacccgagctaacgagttactgacggactttgatttggaccaatcagcggatcaaacattggcgactttttcaggtgggatgcggcgacggttggacttagcggtcagcttagttggcaagccaaggatcctctttctcgatgaacccaccactggactggatccaagaacccggacgcaaatgtggcatgcgattcaaaaattagtcgcggatggctcgacaatctttttgacaacccaatacttagaggaagcggatcaatatgcggatcggattgcgttgattgatcatggccaattgattgccagtgggacacctagtgagctgaaagcgcaagtcggtggtcagcagttgcagctgacggttgccaatcaacaacaagttacccaggctcagacgatttgcgagaccgttttgcaacagcccgtgcgtgtgacggatcaaacaatcattgggccgttagtgcacgatgatatgggcgtcatcaccgcgattttaaatcaatgtcagctggcaggcatcaccatcagcgatttacaattgacagccccatcgttagatgacgtctttttgaaaatgaccgttggtaaaaactaaggagataataacatgctacaaatgaaaacaaatacgcaagtgttgcgcaatagcttaacgttaacccatcggaatttactgaagaccttgcataatcctgataatgtcagtgatgtgctggcgccctaccgctaattttggcgcactcatgatggcgttattcctagctgtctttattggctggtcaacgtcgtggattttcgccttagtcggtttactggttaaaaatgtcgaactgattagtagtttatcgatgatcatcattctggtattgaccttcttatcgaacgcctttattccagttaaaaccttaccgcattttctacaaaccattgtccgcattaatcctgtcaccacaaccattacggcaatcagaggaattttgaacaccggtcattggagcggaaccgcaacaatggtcctcgtcagtggcgctgtgattattctggtgtttatgccactgacagtcatggcgtatcaacggcgtgactagaataaaatagcgcgccgcacttgtaagatagtgagacgcgctattttagtttaaattacttggtagtcgatttgatcaatcttgattttgggtaattcatcaatattcttgtctgtaatgatagcgaaagagacatacgcgcgatcattttcaggaagctcttcgtaagtgatcgtgccgtacgcaagtttaaacagcttagcatgcttacctacttgatctttagcgattgcaaacacatttggctggtcaaaatacgtatttgtagtttgttctttgccaccttcaagatagtgtttcatagcagtggcatccttgatgaacccttttacagagtttagcactaaataatcgttaccgacgcgataaatataaccagagactttcttttgattcgaatgagtcgtagttgttaatctgattgttccatgtttaggtaaactagtccctttttttagtctgtgttttggatggtgtatgtgtttcaatggaacgattgcaaccagtcataaaaaacattgtgatagatagtaataaaatgaagactggcattatttttttcatagtgattgttttctccctgatcattgaatttgataaattggatagcgattgtagagcgggtcgtttagattggctgtggcaacaatggcttgtagtgtgaagtcgcgtggaatgcccactgtgaccatcccatagccaaagtcttggtgtggtttaaactgattatcggcaataaaaatgaagccgtcttcgtccagtttttgataggaatcgtgcgctagtgtttgcgtagttgtttgactcaaaaacgttttgagcttatttttcgtattcagttgttcattcggttgatgcgcaatgacgaaaaaggttttatgccggtaagacagccaataggcttggacatcttttttgtcgtaagtctgttggttttgtggacgcaccgtttttttctgcgaactatgctgaggcgtcgttgtttttgcaggatggttctgacaggctgttagtcccaataatgcaacggtcagcgtcaatgttagccagagatgcctgattttcataagatcagtccttcacagtttagtttaccccctataattataacagttacgcctactttgactagtcttaaatattaagttttatcgaaaaacgataaaaattaattgtttttcaataaaaaacgattataataaaactattcttaaaaacgaggtatcagatgaatgttaaaaaaatggctacttagaatggcattactcggaattgcggcggtatttggtctgttaagtttgttagtgacgatccaaattgtgaccacgaaacacttagaatacccagcgacaatctggatgttggcgattgctgcgtatggtgtgacggctagtatttggtttgcattaatcaagttggcgcagattctccgcttaattgagcaccatcaagtttttctccctcagacgctacgatatgtatcagcaattagaaaagcgattttggttgcgagtttgacggccctttttgccctaccctttttctaccggattacgcaactcgaagatgcaccaggcttgatgttgctggggttaggcctggtcttcattccgtttgcaatcctcattttgatgcagattgttgaagatctttttaaaagtgcaatcgcctttcaatctgaagtcgatttaacggtctaaggaggaattcaatggccattcgtgtgaatttagacgtaattctcgctcaacggaaaatgagtgtcacggcgcttgctgaacaggtcgatattacgattgcgaacctttcgaatttaaaaaccggtaaagccaaagcaattcgcttttcgacgctcgagaagttatgtcgcgtattagactgccaacctggtgatattttagaatatagcgatgattaatcctgcggcccccttttatcggggaccgcttttttaatgcttcagtacactggttgatgcgatatgtagtataataaatccgtagtgattatgaaaggggttttatgctgatgtattacgttgtgatgaagtcaaatgatattcgccgaaacttggcaaccgaacaatatttaatgaatcaaaaaaatttcgatgaaccactcttactattctacattgagaaaccatgcattatcgtgggccgcaaccaaaatacgtatgaagaaatcaatcaaaaatacgtggaagaccatgatattacggtcacacgccggttgtctggtggcggtgggatttatcaagatctcggtaacctttgtttcagtttcgtggtgaacgcagattctgaacaattcggtgatttcaaatccttcacgcaaccaatcgtcgatgcactccatcaaatgggcgccacaacggctgaagtttctggtcgcaatgatatgttagtggacggtaaaaaattctcagggaacgcgatgtacaccaagaatggtaaaaccttctcccacggtaccctttcatgggatgttgatttagatgttttgatccaagccttgaatgtccctgcagataagattgcgtcaaaaggcattaaatcgattcgacaacgcgtcacaaacctaaaagggcacgttgaccctgaataccaaaacatgtcgacagaagagttcagagacgtcttattactgaacttgatgcacgccgatcaactagctgatattgccgaccgcgaatatcaattaacggctgcagacgaacaagccatcgataagatttttaacgatctctatagcaattgggactgggtctatggcaagtcacctaaatcaacgattcaaaaacgcaaacacttcgatttcgggacgattgatgcgcgcttgttaatcgaaaatgggaagattgccaacgtcaagttctacggcgacttcttcggttccggcgatgccaacgaattggctgaaaagttagtcggcacggtttatgaccgtgaacatttagcaagcactctcgaaccaatcgacaccacgtcctacttcacagggattccaaaaacagaattagttgaattattagcacaatagtaactagctaaaaagagctactaccaaaataatcttggtagtagctcttttaggttaacgtgcaaatcgtttaaaacgaatcgtcatgcgtctggtttgcatgaagtgttgacaaataccagcaataactaatgggatgaggatgcctattaccccactaatccagaaaatcggttggtggaatagatttgcgagttggttcattggttgatcaccaggaatgttcaggacaaaagtatccacccagcttggtaacatgcgttcaatcgctggttcaatgtagtgttgatagagtgtcgacagaattagccatgcagcaaataagaaaagccaagctttacgttcaaataacgtaatgaaactgctaatggcaatcccttctgccatgatggtccagatgagtacaatggccagcaggacgaaacggctatcaagaaagaagcgattaatcccactttggtgggcagcaatgaagtatgtgccgccgtagagtgctaggaaactaatcaattgactgctgaagaggctaatcacttgggtggtataactaatactgcgcggaatgccatttagaatcccaaaattaaacggcttgcgggttgtcgcaaacgaaaggaaaatcagaacgagttggctgacgactaaggaaccgctcaagagcgtgaaccaaaaggccttccaggtcatttggttggagaagattaaaatggaaccgcctgtgatgatgacgaagacggcaattgccattaataagccgcgccaaatcgctgctaggcggtaccgcatcattgcattaaacatgtgcttcacttcctttgttcgttaatttaatgaaagtttcttgtagatcgatatggtcaatcgttagacgatctggaataacccgttcttctggtaagacgtcataaagataaaccgtgtataaggtccccatttgctgggaatctaagacgtttaagtcggtacagtactcgcgaacaagttcttccgggccactgacacggtaactcttggcgaggacggtttccaaatcatcatcgacaattaattgagcgtcgttcaagaccaagacgtgttcgactaaggtcgcgatttcttcgatgatatgggtcgcaacgacaaatgtccgtggccgactttcataggcctgtaaaatgtagcggtataagaggctgcggtagttagcatctaagcctaagactggttcatcgaggaaaacatattccgccggcacacaaagcgcaacaattgttttaaaaatcgtgcggtacccagttgaaagctgattgagtttcttttttggattcaaatcaaatgcagtcagcatttctttggcgagtgcatgatcaaatgaaccttgcagtaaggcggtatttttaataatggtccgcaatttgtcatctttattaaagagattgatttccgacatcaagtaaatcgtttgtaacggatgatcgcgaccggttaagaccgtatcgccccatttaatctcacctagggatgcagtttgatgattggctagaatacttaataaggtactcttacccaccccattgcggccgagtaagccgtaaattgtattgggtttaagtgttaagttgatgtcgtcgaggacgacctgtttcccaaattgtttaatcagttgtgtggtttgtaaattaggcatggtcataacccctttcaatcagtgcaattaggtcgtctttggttagatttaattgttgtgcttcagtgataaattgggcaacatagtgttcaaaaaattcagattgccgtttttcagtgatctgtgcgggtgcgcttgatgtgacgaacatgccgagtccccttttcttttcgattaagccgctggtaacgagttgattcatccctttgagtacagtggctggattgatattgaattgtctggaaatttcagttgtcgatgggacttgactaccaggtggaaagaccccagtaaaaataccctcttcaatttgttcggcaatctgccggtagagtggtgtatcattattaaattcaaaaagcatccggaacacctccgtttcgttaattggttagttacttatgtagttaactataatacgtaggctgcgaaatgtaaaccgctcctcaaaaacatttgattattcgttcatattcacctattatgtacttataatcaaatgttttcagagaggatgagaacgatgcagacagcctattgtttcattgatttagcggatagccgcactcgttttacggaacaagcacagacactccagttattgcaacacttcgccgacacgttgaatcaccattttccagcattattaacaccatttgcaattaaggatggtgatggtctattgggcggtttttcagcggatgaccaggcacagattgttgatgtctatcccttttgtaatgcctatttaaagagtgacgcttttcaaactttctggcagacacattttgcggggctggcggagcccactttttattttggggttggcttaggaacgatgactacgccgagtccaagtgactatcaggatatcaatcgggtcaacgggacagcaattgtgaacgccctcgccgcagcagatcaagccaaactgttgcgtcaaggtgctgaattagcacaaggttatccctttatgacgacggcctttcaatttcaattagtggcagatcaaccagccgcaaatgggattaatgccctcttttatttaatttatgagcaactcttgaatacgcagttgcgcaaggacgcttttgctgaaatcgtgcttcaaccaacattgaaacgctatgaattagcggaattgttgtggaccaaatacggcgttgcttcctatgaactagactacagtgatcaaaaagggcgtgcattagcctctagtaaagtcagtcgcttactgaatcagattcagtatcccttgattgaacagaccctggcaacgttgcgcgcgcaactgatgacctttaaggaggcagtcgaatgaacctctttgcgcttttcttgcttagtcatattggctgcgactttgtctttcaatctgatcagatggctcaatgcaaacgatcaacgaaactcggtgtgaaatggtggccattatgcaagcacgcactgacacaagtcccgttagtgcttattttatggggtggcggttggttaatggcaccacctacttggccacattggcaaccgttactaatcggcttagtcatcattgtgatgagtcattggctcattgatctatttaagcaaaatagccagccacttttaaaagcacagctacatttaaccagcaatcgcgtaccagtgatgagttataccatcgatcaagcactccatttaatagtgatcggtcttgtgagcatgttcctcggccagcaatgggcgtttaaccatgtgaaccgattgttattggctgccagtattgttttgagcacgttattatttgccgattatttcattagcttctatttaaaaggactggatttaaacatggatcgcctgccagatggtgcaaaactgggtcggcatattggtcatttagaacggtttgccatcttaatcttgttttacacgcacaatgttgcgagtattgctgtgattgtggcgattaaggcgctgacccgctttaaagccattgaatccaacgaacaccacttcgccgaatattacctcattgggagtttgctcagtctgatcttcggctgtcttggcggttatctattaagtcttattgcgcattaaaaaagtgccacagaatcaggatttttcctgttctgcggcactttttatattattcagcgatgattaataatgatttaatcgctttgcgttgatccattgcttcataagcggcttgaatatcatctaaggtaaagcgttgtgtaaagactttaccaggattaatggcaccctttaaaacagcatccaataaacgagtgcgatcatgagtcgttacggcagcaattcccccacgcaaaccgatgttcttccggaataaggcattggtgttcatctctgctttttggggaatgccgacacgaccaatgacagcccctgcgccagcaacggcgacggcagtggcgacggattgttcggtcccgacacattctaagacggcgttggccccagcgttgtcggttaacgccatcacttttgcgaccccttcgtcaccgcgttcagcaacaatgtctgttgcgccgaattcaagggctaatttttgccggtccgcatgacgactcatcgcgataatccgtttcgcaccgagtaatttggcgccaatcacaccacataaaccaacggcgccatcacccatgacaacgactgtgtcaccgggtttcacttcagcggacacggcagcgtgatagccggttgccatgacgtctgaaagcgtcaatagattattcagcatttcatcagagtaatcgcttggttggccaggaactttaacgaggccccagtttgcattgtgataacggagatattcggcttggtagccaccaggattattctcgcggttggtacaatcgccatcaaaaccgtttaaacaagcggcacagtggccacaaccatgggtaaatggcacgatcacaaaatcaccgacactaacattttgtacgtcagtcccaacagcatcaatgatgccaattgcttcgtgaccggtgaaaccgcctacttctcgttttgaaatcccacgataccaccataaatcagaaccacagacgcacgcgcggataatgcgcacgaccgcatcggttggtttttcaatcgttggttttggtgcttcggtaatggtcatttgaccaggacccataaaagtagctgttttcataactataatctcctatctcttcctattatattgtctttactatacaccttagacctcactttaatgcaagctttttttaaagtccaatcgccagttgttgtttcttgcttaacacttcgtcttgggtaatcccaatataatggagcgtcgtttcttgcgttgaatgaccaaaatcaatcatcaatgaccgcacgtccccgaattgtttgtagaaccagtagccgtaagttttgcgcatcgtatgggtgccaatatcattacgcccaagtttcttacctgcttcagtcaacatgcggtaaacaccgttgacggtgatgtggttatcgccgacgcggctaggaaacaaccaatcattgcctagcaattcattattttgaatatagggactgatgtatgggcgtaaactcgccaaactaatttggcgccacttacccgttttttgttcaacaatcacgggattgtcttcgatcacatctttgacttttaactgcacaatatcagaacagcgtaagccagtattaatgccgagtaaaaataataaataattgcgactacccatttgtgaatggcgcaagatgactttcatgtcttcaatctcatcttttgtccgtaaaggttgaacatttaattttttgccttttttagtgcgcgatttccgcatgttttttccgcctttttgaccgcattctttttctctatatcattataaaccatgcggtggtattttgcacctttgattatcgttgatttaaagggattccgagcgcattctttctaccaaaagaatgcgctcaaacacattaaaggctattgatggctaaatcacggtctaatcacgtttataaacgatcaatcaccagaggcgcattttaaggacgtttcagattagtgagtggacaagtggtcgcgaaacttgcttaaaatgcgaattaaaaaaggccccttaaagtcacaaaaaaaacagcgttaagacaaaaagtcctaatgaagtgaacccccgatattggaccaaaatccaatatcgggggtttttatattgaccaaatattctaaaacattaaaaataaaagttgttcaggattatctaacgtcacccttaggttataaattaatagcgagaaaatatggtattaagagtaactcactagttgtctcgtgggttcaacgttataaggcctttggcccaaaaggactggatgtcctatcacccaaaaaaacatttgatggctcatttaagatgaatgttttaaaatggatgaaaacgaataaggcttcttatccgaaaaccgcacttcattttaatatctcaaacgtcgggaccatctggcaatggcaacatatttgggagactgagggtgctgatgccttatatcgttccaaaggacggcaaacaattatgtcagctgataaacaatcaaaaaaacggcaacaaacagagttagaacgtcttagagaagaaaatgagttgttataatttttcaagaattaaaacaaaactgggttgtaaaagtccgattgaatatcgaatttttacaacccagaaagctgcttaaagtttcgtccaatatttggggttcacttcactcaacctctttttctatgcattatgatgatcacttgtttgtgtgatttgattaattttcgcgtgtaattcatggacttcagcttccttatccgctaacgctttatcaaatgctttttgattctttattttttctgcttcaaccgctgctttaatttgagcagcttgattgtcgcgtaattcagtgacttctttggtcatttccttttgtgctttccgttggctcaacgtgctgccagtcgctgccaagaaggtaatgatggcgccaatcaataatgacaccaaaataacgatgattaatggccatttaacatgggtgaatccaaagttaatggcgactggttcaacgtttaaaacagcaaaaattacgacaattaatgctaggaccaatactgtaattaatcgaccttgttttttcataaaactgcccccctacttcttattcaataagttaccggcaacatagtctccgatatgtggtgccagttgatagaattgtgcaccgatcgccatcaaccatggtgcattaatttcacgttttgcatgcccgattgttttcacaatccgataagctagttgatcaggatctaaaacaacccaatcgaccgatttcaaataattaccggtcttatccgcaatatcaaagaaagctgtatcaatcggcccaggattaacggtagtcacttgaaccccaaatggttttaattctaagcgtagaccatttgaatagccaacaaccgcgaacttagttgccgaatagatggccgacttaggtgttgccatcttgcccgccattgaagcaatgttaatgatgtggccgttaccttgttcaatcatcatccgcccaaaagcgcgcgtcatgtacattaaacctagcacattaacccggaacatctgctccacaacggtcatggatgtgtcgaatgcattttcaaaacttccaaaaccagcagcattgactaacacatctggaatcccgacttcagtttgcacctgagccacaatggtttcaatcgctgctggatcactgacatcgaggacatatgcatacgccggctgtcctgaaagccggtgtgcttcttcgcgaaccgccgccaattcagcttctcgacgggccaaaacgacgataattgcccctttactagcggcttcataggcaatcgctcgtcctaaaccagacgagccgccggtaatcaccacaattttacggtttaaatctctcaatgctgctaatttagtcatctgtttactcctttcgaccatgaaacggaatgtcatagatatctaagtcactaactacttttgtgtttttaaaaatatcgcgggcatcattttgtaaatcacgcactgcttgcccgaggtaccgggcagaaatatgggtcaataataaccgcttcacatgcgcggcttttgcgacctttgctgcattaatgttagttgaatggaaatattgacgcgcaatcttttgttcttgcttaccgaaggtcccttcatgcactaatacatctgcattagccgctaagcgttcaattggtggacattggcgggtatccccaataatggtcacaatccgtcctttttgagcatgtccaatgtaatctttgccatcaatttggcgcccatcagcgagtgtaaccacttctccctttttaatctttgcgtatacaggaccagccggaacaccatctgcatgcagtttctcaacttgcagttcccccggatggtccttttcaataatccgaaaaccataactggcaatccgatgatccaatttagcacattcaacccggaaagtcgcatcatcaatcaaaacaccttcttcaggaagaatgacaaagttcaatggatacgttaaatgactttcagagatttttaaactcgtgcgcacgtattcttcagttcccttagggccgtaaatcgtaagtggttcgtcgccaccttggaaagatcggcttgataaaaagcctggtaacccgaataaatgatccccatgtaaatgtgtgagaaagatctttttaactttgcgcggttttaatgtcgtttttaagatttgatgttgcgttgcttcaccgacgtcaaacaaccacacttcatttcgttcatccaataatttcaatgcgacacttgtgacgtttcgttgtcgtgctggaactccagcgcctgttcctaaaaattctaattccatttagctcttccaatctgtctttaattcaacgctttattttgccgcgagggctttggtaataatggcggcatattcattgaccccagttgggttcggatgcaccttatcttggtagaaccagtcactgtgtttggcagcctgtgaataccaatcaatcaccgttaagtttggatactgtttagttgcatttttaagcgcctggttaacatcattttgccaaggacgcgttgggacaaacgcgttgagccaatagacttttcgcttagtcccaatggctgccataaattgcgccatctgttcttgcgtaaaggcgccatttgttcctagactgaccagtacagtatcgctaagggcttgtttttgatcataatcttttacaatttgaatactttgatagagttggcgcccaacagccgcatcaaccaacatattcgggaataacttctgtaaagcttgactaccgtcgagtaggacggaatcaccaattgcagtcaccgagatattctgggcccgttgaatcgtcacttgactcaagccatatttttcaaattcttggttgattggatgcttttgcgcagccgcctcagccgctttttcagcttttgaagttggaccatttgcttgtccagctttattctgggcttttgcttttttaatcaacgcatccttacgcttttggttagctttttgattttgcttaatattgaccgctaatgccgatttatgcgtatctggcgccggttggaatggcgcttgaaacgccccgactaacccgattaaaaagacaattgcgagtccagtcactcgaccaaccacccgattccaatgtggttggtgcataaattgcttcaattggtgccataactgcttgtacggatagtgtgctagtggctgttcaataaaccggtaggataattcggtcaatccgaaaataatcgccacttcaatcactggatataaaaccgggtgatcagcgatatttttgaagattatttcaaagaaaatcatcaccggaaattgatacagataaatcccgtaactccgtttacctaaccagttaaagaccggattcgtcaataaccgattccaatcagcgcctggatgagcgacaactgccactaaaacacagactaaagcactaaacagaaatagtcccccgcgatagacaagactactctcggcattcaacttaaccattaaccaaaccaaactgaggacactcactaacccgatgccatcgaggacgaggcgttgtttaggcacaatcttttgcttaagggctgttgatggccaaacaaacgccagcgctgctcctagtaaaattgaaaagacccgcgtatccgttccataatacaaacgactagggtcagcattgggttggtacaaaatggccatccagattgctgaaacaacactgactgctagtaatacttgggcaatccgatttttattcttaagaccaataatcaaggccacaacgataaaaggccaaattagatagaactgcccttcaatcgatagtgtccacagatgggtaaacggcgactcattattggcaaaccgatcgaaatacgactgaccatgtccaatttgccaccagttataaacgtataaaatgttcgtgataataatctgattaagttgctgtaacatttcccgctgaaaaagcgtgatgtacgcgcccgttgcaaacagcatcgttatcagcccagggtacaatcgttttacccggcgtaagtaaaaactttttaaattaatccattgattttgttcccactcttgaaccaataaatcggtgattagataccccgaaaccaccatgaagattgggacccctaaataaccaccggtaaaagtatatggcatcagatggtataaaataacaccaatcacgccgattgcgcgtaaaccatcaaagccagtaatgtaacgactattctttaaacgcttcttgcccgccattttttcaacctactctacattctaataactgctattataacaatattttagtgatgtgcctacattaagccctgttattttatgcatcccatagaaaaaggaagcattcaaaaatgaatgtcttcctttcttgacgtgcctattattcgacaaattcaaacgtaaagttatcaattgccactaaatcaccatcatgtgcgccactttcgcgtaaggcttcgtcaatccccattgaacgtaattgacgggcaaaacgcatgacaccatcttgatgatccaagttactcatcttgaagagtttttcaaccttgtcaccagacacaataaacgtgccgtattcatcttgttcaatgatgaaagcaggtgcttccggttgatattgataaagtttttgcgtttgaacttcttcgacgtctcccattgggaattcagtcgtttcagctaataagtcagctgtcttgttcatcaatgattgcaccccttgatgcgtgatacttgaaatttcaaaaatctcatgtgtatcgccggcagctgctaatttttgtttaaactcggctaataattcagaagaacctggtaaatccatcttagtcgctacaatcacttgtggtcgttctaagatttttggatcataggtctctaattcgtgattaatttgttggtaatcttcaaatgggtcgcgacccgtttgatcgtccatttcgattaaatgcaagacaacccgtgttcgttcaacgtgccgtaagaattgaatccctaaaccaacaccgtctgaagccccttcgattaaccccggtaaatcggctaagacaaagtcccgaccgtcatcgagttgcaccatccctaagttagggaccaacgttgtaaattggtaactagcaatcttaggtttcgcacttgtcaccactgacaacaacgttgatttcccaacagatgggaaaccaaccaacccaacatcagcaagcacttttaattcaagttgaatgctgcgttcttcaccaggttcaccgttttcggcaacttccggcgcactattacgggcatttgcgaaatgcatattcccacgaccaccacgaccgcccttagcaatcactaattgttggccatcttcggttaaatcaccgagtaattcattggtttcagcatcgcgcaccgttgtaccaggtggcacttgaacaaatgtatcctcggcaccgcggccgtacatttgtttattctgaccattaccaccactattggctttaaagtgatgacggtaacgaaagtccattaatgttcgtagaccttcatctaccactaaaatgacacttccgccccgaccaccatcgccaccggctggtccgccaagtggcacaaacttttcacggcgaaatgcaactgcaccatcgccgcctttaccagctttcacatcaattttgacttgatctacaaacatattttgactccttctcatcgttaaacagtaccttatatactaccgaaaaaaagactaaaagtaaacagataactggttaaacactgaattggctctatcatcgataaaaagcgcactgagtgagtgacctcaatcagtacgcttttcattcgttaattaatggctagctggcaccaatttaaattggctccatggtttcaaatagtctaataggaataattctgtaggcgtaatacggccaaccacattcacgcgcccgtcatttggcatggctttgagggcaatttgggtttcccctttatactgaccgtaaccgacgttatcgattaaaatatcaccgcgttggatgtcaactgtatggtgggctgggaaaggcaggtctttaaaaatgacccgtgtcatcgttgaccgtagaagatattctgaacgatcgccacgataactatgcagactttcaaagaggaccttgcgttcatcagccgtaatgtcatctgcgacgtcgattgcgattgctgggaattcagcgttaaagacgtcatgcatcgtcttcaattctgcttccgaagcatacgcattaccgacaataatgtcatcaatgttatccattaaaacgtaatgtttcatctgcgttgccatcgttaaatcgcgatcaacttccatcgtgggcaacccatcttgtgttggccatggtccgaaagtcgcttcatgtgaattgacaaacgctgctgtattcaaattgtattttgcaaattgcgccgtacattgtttgaagaagtcttcacctaatcctgagaaccgatgtggatagaagttatgacagcctaacaagttttcccgtttgggtgaataactcataatgttatcaacgtaacttgtcccttgactcatattaatttcaatttttaaattaaacggattgcgcgtcatttccgcttcttcttggccggtaaaaccgttgtccaaccgaattccccaagcaccaagttcatggaaaaaacttaaattatcatatgaaataccgagttgcttgaacaaacccggattgatatcaatcatgacttgcattcctaattggttggcatgggctacaacccgtttaaagttgcctaacacggcttcttgatcgccagacacctccaataatgatgtaaagacgcgttggaacccatattgatgcgctaaatctaagtaagccgcatccttttcaaaagttgatcgttctggataaattgaaacgcctagttttcccatgagtagaacctcctaataattgggctataccaccctgtcatctattagtctagcataccttaagcacttttgaaaactcttacattacttttaaactggtctatttctggcattgtccgcagtttgctcactaacgcaccaatctttttttcggtctatatcagcgttttgatggtttttaaacgtttttgaaatatttcgattgcttttgaatggaaacgatgtcataatgatgctacggaggttttgtcatgttaacagaagaacgtcaccaagcgatattacaacttttaaagcaacaagacgtcgttaagatgcaatctttgtgccagttattgaacgcttctgaatcaactgtccgtcgtgacttgcaattgctcgaagaacaagggcttgctactcgaattcacggtggtgctaagcgcatcaacacgttacaagaagaacttggccagattgaaaaaaacggcaagaacgttcatgaaaaaaacgcgattgctaagtttgccgcagcacaaatccaacaaggctgcgtcatttacttagatgccggcacaacgacccaggcaatcatcccctacttaagacctgaaatgaatttgacggtcgtcaccaatggggttgataccgcttctctcttagccgatcaccaaattcaaacctttctattaggtgggcgtgttaagagcaaaaccaaagcgatggtcggtgcggctgctttagaaacccttttgcaattccaattcaatcaggcgattcttggcacaaacggtatcgatgttgaagctgggctaaccacccctgatccagaagaagccactctaaagcgctttgcgattcaacaagcgaaccaaacgatggttttggcggatcacacaaaattcgacgctgtttcgttcagtaagtttgccccattggcacaagtccaattgattactgatcaattgtcaccatctgtttacaaacactatcattcacacacagaaatccaggaggttttatcttgatttatacgattacggcgaatccatcaatcgattacgtcattcaacttgaaaaactaaataccggtaacgtgaaccgcgtccaatctgacgttaagctccccggtggtaaagggattaacgtttcacgcatccttgccgaattagcattaccaagcgttgccctcggctttgtcggtggcttcactggtcaattcattcaaagcaaactcaacaacgcttcgatcgactgtcgattcactgaagtcgaagaagacacccggattaacgtgaagttaaaagacaatactgaagaaactgaaattaacggtcaaggcccacacatttcagcagaagccgttgccaacttgaaacaacaactgactaagctggaagccggcgatattgtcttcatgtctgggagtttgccacctaatttaccggctagtttctacaaagacttaatcccattgattcaagcgcacaacgctgaatttgtaattgatacaaccggtcaagctttgttagacacattggctgaaaaaccattggtcatcaaacccaaccatcacgaattggccgaactgttcgacacacactttgccaaccaaagtgaaatcatcgccgctggtcgcaaattattagaccaaggtgcccaacatgtcttggtctcaatggccggtgacggcgcccttttaatcacaccagaccacgcttacctcggtagtacacctaaagggacagtgattaattccgttggggctggtgattcaatgatcgccggttttgtcggcacattcgcacaacatcacgatgcactcgccgcttttaaaacaagtcttgcttgtggtagtgccaccgccttttctgaagatttagccactagcgctaagattaacgaactcttacctcaaattgaaatcacacaagttgattaattttaaatacaaaggagatttattatgaacatccaagatttactcttaaaagatgcgatgatcatggatttacaagcaacgactaaagaagccgctgttgatgaaatggttgcccgctataaagacatcggtgttatcacagatgacgccctctatcgtaaagatattttggctcgtgaagctcaatcatcaactggaattggcgaagggattgcaatgccccatgcaaaagacagttccgttcaacgcgcaactgtgctattcgctaaaagtcaaaacggtgttgaatatgacgcactagacggccaacccgtttacttgttcttcatgattgccgctccagaaggcgctaacgatacgcatttacaagccttggctggtctttcatcccttttaatcaacccacaattagtcgctgatttgaaacaagcccaaacaccagaagacgtgcaaacgctctttgctaaggctcaagctgctaaagacgcagaagatgcgaaggaagaagctgaagaagccgctaaagcacaagccgcagccgcaacgccagctgatgatcaaaaaccattcatcgttgctgtcacagcctgcccaactgggattgcccacacttacatggccgaagctgccttgaaagaaacagctgctaaaatgggcatcgacattaaagttgaaacaaacggttctgaaggcgttaaacaccaattaaccgctgacgatattaaccgcgcaacaggggttatcatcgctgccgacaagaaagtcgatatgcctcgttttgatggtaaacatctcttgaaccgtcccgtgatcgacggcatcaagaaaccagctgaattgattcaaaaaacattggatgaagaaggctcaatctatcacgcaactgaaagccaatcaagcgaagaagcttcagctgacaagaaaaccctttggagtcgcatctaccaagatttaatgaatggtgtttcaaacatgttaccattcgttgtcggtggtgggatcttgatggccatctcattccttttggaacaaaccgttggcgcacattcaaccacttttattttcttgaactcattaggcaataatgcctttaacttcttaattccggtccttgctgcttacatcgcgatttcaatcggtgatcggcctgccttaatgcccggatttgtcgggggctacatggctagccaagcaacagccagtgtccttgcttcaaagagtccagccggattccttggcggtttagctgctgggttcatcgctggttgggtgatcgttggtttgaagaaagtcttcaagaacttgccacaaacccttgatggtttaaaaccaatcttaatattccctgtattaggactattgattgttggctttattatgtacttcatgatcaacccagtctttgctcaaattaacctctggttgagtaccttcttaacacacttaggggctggtaacgcattactacttggtgcgattttaggtggcatgatggccgttgatatgggcggtcctttcaacaaggctgcttataccttcgcaatcggtgtcttcacaaccaccaaagatggttcattgatggccgctgtcatggctggtgggatggtcccaccattggcaatcgcggttgctgctactattttcaaaaacaaatttaccggtagtgaacggaaacaagccttcgcaaactatgtattagggatttcattcattactgaaggtgccattccatttgctgcatcagatccgttacacgtgattgtttcaagtgttatcggttcagcaatcggtggtggtttaacccaattatggcaaatcactgtccctgcaccacatggtgggatcttcgtggcaccacttgccaaccacggcctactctttgtgcttgccgtgttaatcggaacatttgtcagtgccctaatcttaggcctctggcgtccagtggcaaaagaagcttaatttaaaaagtcgtagtcaaatgactgcgactttttatttatcttgaaaatcagtattgtgcttttgtttccattcattaatgtaattcaaacgttgtttcatccgcgtttcattgccttgttcggtcggccggtaataaatatggtcggcgatactctctggtctagttggcatcgtggtcaatctatcatcgtagaaatgtgcgagttgatatcctttgccgtaaccgacttccttcatcaatttcgtcgccgcattacgcaagtgcaatggcacgggttcatcaatcgtctttttaatatccttttgcaccgctgtccgcgccttataagtggcgtttgatttcggcgcaagcgatagataaatcacgcactgtgttaaatgcacgtcgcattccggtaagccaatcgcctgacaagcttgaaagacgttcattgctaaattcaatgcattgttatcggccagaccaatgtcctcactcgcaaaacgaacgagccgccgagcaatataaatcgggtcttcgccgccgtcaatcatccgccccaaccaataaatcgctgagtcgacatcactattgcgcatcgacttatgcaaagccgaaataatattatagtgttcctcaccgtctttatcataataggcggtttttttatttagcagttcccccaatagatcgccatcgacggtcacttgatggtcttgcacatcactattaataactaacatttctaaaatattcagcgccgtccgtgcatccccattcgaaaagatggcgacttgcttcaataattcatcactgatatgaaccgttaaatccgggaaggcttggggcgcctttaaaacccgttgtagcaactcaataatgtccgcttccgtcaattgctttagcacaaaaacgcgtgaacgcgacagcaacgctgaattgatttcaaacgacggattttcggttgtcgcaccaattaggataatgctgcctttttcaacatacggtaaaaaagcatcctgttgcaccttgttaaaccggtgaatttcatcaataaagacaatcgtccgctcacccagttggcggttttcttcggcttcattcataatcttccgaatctctttgatcccattcatcgcggcactaaacgtgataaatttcgaagccgtcttgcgcgcgataatctccgccaacgtggtcttcccaacgccgggtggtccccagaaaatcatcgaagtcacttgatctttatcaatcatttcgcgtaaaaacttgcctggtccgactaaatgcttctgaccgacaaaactgtctaaatcagacggtcggacccgattagcaagcggcgcattcatcgccatctcttgatcaaacaaagaggtttgtcccattttttcaccccactttagttgttgttaattgaaacttcttaaaatgtgcccgtaaataacttaaggttaaactctccgcgtctgaggcaacaagctcaaatggtgcacccatcgccatcacttggcccccttgactaccacctttaggccccaagtcgatcaggtaatcggcattggtcatcaaatcaaggtcgtgggtaatcatcataatggtggcacccttggattttagctggttgatgacgcctactaaggtttcaacatcgcgcggatgcaagccaacagaaggttcatcgaagacgaataaagtgccagcccgttttttattcaaatgcgttgcgagttttaagcgctgtgcttcgccacccgaaagactcggtgtactttcaccaaggtgtaaataagctaagccaatttctttgagaatcttaagttccttttgaattgctggcacatctgcaaagaccgggattgcttcttccaccgataaagccaatagatcaacgatgctatagccttgccacttgatggcttcaatctctggtttgtagcggttaccatgacattctggacaggtttcttccatgtctggcaaatattgaatatccaaaataatgctgcctaacccaccacagttcggacaggcgccttctttattgttatacgaaaagtgcgcgatcccataatgatgcacttgtgattctggtaaaccagcaaataatttccgcagattgttcatgatactcgtataagtcgcgagtgttgagcgtgtattcttaccaaccggcttggcatcaatgctgacgactgacgttaaatcggtcgtcaactgggtgacctgctcgggtaattgctcatgttggtggtgcgcttcaattgctggcactaaactatctagaatcaaactcgtcttcccggcgccggaaaacccagaaaccgccgtaatttggttatctggcactttgattgtgacatcatgcagattaaaatattggccaaccgtcatcgttgtctgctcaccagtcgttgcggcagtgactttaggatataagatgttcgctcgaccagcgatatagtggccaatcagggactgtggattctggatcaaatccgcgggtttcccttgggcaatcacttgtccccctttgcgcccagcttctggcccaatttcaatcacccaatccgcttgactgatgatattcacttcatgatcaactaccactaacgaattgccttgtgccactagctgccggaaaatatgaattagcccttcgacgttgtcaggatgcagcccaatcgatggttcatctaaaacgtacaacacaccagttgtcgctgttcgcaacgtccgcgccaattgaatccgttagagctcgccagtcgacaatgtattcccattgcgcgacaacgttaaataatccaaccctaattctagtaacggttgcagtgtttctaataggttcttaaataaaattgtcgccatttgctacatttcatccggtaagtcggccttagtagcacgcacccaatcttctaatgcgcctaacgtcaaattagaaactgctgcaatgttttgtccgccaactgtttgggtcagtaatgccggatttaaccgggtcccatgacacgttggacaggttgaaaaatggaaaaatgaattgactttagccattgcccgatcacttttaaccgattttagcgattcataaacagcgtcataagcattttcatagagggtattctccgtactaaacacacggcccgttgaggtatggaaatcaaccgcatacttcgcccgtttaccatgcaggacaatttctttttccttggccgtcaagtccttgtaagggacatcaattcggaccccaatgtgggcagtaacggttggcatgaaattccggcccggcaatcgccatgaggcaatcgctccgtcttcaatactgagattttcatccgcgatgattttgcgatcatctaacgtttgaatctgccccgtcccatgacattctgggcaggcgccagctgaattaaaggcaaagtcttcggccgatttagccataaactgcacttggcaagtagggcacgtaataatccccattttatcgccagctaagtccatcgcttgggcaatttttagacttggttgaatcacgtgcccatttggacaacgtgtcgtccctaaccgtgaaaaaatcaatctgacgacattaaaaatctcactcatcgaaccaacagttgaccgttctgatggcacacttggtcgttaccgaagtgcaatcgctgatggaatatgccgcacttcttggacttgtgagcgtttattctgcgtaattcggcgccgcgtgtacgtcgacaacgcctctaaataacgccgtgagccttctgcatataaaatccccatcgcaagcgaactttttcctgaaccagacggtcccgaaatcgccacaaattggttcaacggaatatcgacgttaatatttttcaagttattgacgttcccgccacgcacttcaatctacgttggttgttcaattgtcattattggttcgctccccttttgcttgacggttaaaaacggccgcctctgcttctaaattcgctaaaattcgttctaaatagccgtcaacagctgccacttcagcatccgaaaagcccttgtaaaaaacggcgctcaatcgttgactaacgtcatcaccgacctgttgctgattagcgccttgttcagttaagtcaaagacccgcttgcgcttatcaagtggcgattgctcactcatcaataatccctgttcttctaagcgccgtaacatcaacgataaactactattggctaagccagtcacttgtgccaattccgtagcagtttgcggatgatgatcccacaatgctgacaaaattttcccctgttcagcgttatagcacgcgcgtggatcagccgttaaataacgattaaaaagtcgggtatttaataagcgaatcttcaaagttaaataaccaccctttttggttttcatcccgtccactcctaaattgtttttatatcagcattaattatatcttactatataaaactaattttagcgagtaaaaaacaccatggtcaaccacggtgtttctaaagaagctgtttcaattgttctgcttggacactgcggacttcttcgactactactagcgcctgcttgtcaatcgttgagaccaccggtacgagcgtcgcgagttgtttggccgtacaaatgacatacagcatcggccggtcattttgactatagtacccttgcgctttaatgatcgtgatgccctggtggaattgcgtcgacaatgtttgggcaatcgttgcatattgatccgaaataatcgtcaccgcgcgttttgccccaaatttagccaataatttattcaaaacgactgctgataaatacaattcaataatcgttaagagcatattttggaagccgataatgaagccggatggaatggcgacaattaaatcaaaaaaaagcatcgcagagccgttttggatccctaaatagcgattggcaatcttcgctaagatcgtactaccagcaatcgtcccttggcaatgaataataatcgccattgcaatccccatcaagacgccaccaattatcgtcggaatgatcgtctgtgtcgtatggtagccgataaaatgcgggagccgcaagaagatagaaatccagagtaccgcccagaccgaataccagatggtttgcttctctaaatacttaaagccgacaatcactaataaaccgtttagaaccaaattcgtagcagctggcggaattgctaacgcatagtagccaatcgccgttaagccagtcacgccaccttcaccaatatgatgaggaatcaggaaatcattaatcgccaccgcataaatcaaggcgccaatgataatcccgagaccatttttaaaaagtgcttttttctgcatcccactcacgtcctcgttcaaactaacataagcgtaccatatttagggtgggagattaaagaacaattgattaactattaatttacaatactctatatttttcctgtgctaagaaaccatttacttactttagaacactctgccagtcattacttgaagcccatccattgtatatacttccacaatgtccctatcaacaatcagcaatacatcatcaacatttcctgtaatttgacgcctttcaattttcgatgttgcccattgacgtctttcaaaatataaccggtcctgatactttttcaagacagcattttgatagatttttattcgcgcgttttataattaagttagccaaatacttttagctaacttgataaaataaaaaacaccaagacaaatctctgttatcattgatgttcctacacaaacaatgaaagaggttattgtcttgatgcaagaacagaataccacagtcagaaaaaaggtcagcacctaacttcgtttgaacgaggcagaattgctacgctgcacagccaaggctattccaatcgtgcaattgccagagcgcttaatgtttgtcatcaaacaatcaataatgaattgtgccgcggcgagatcgaccaagtaaaaaaagtgaatggtcaacgccaatattacgctgtatactcaccagaaacagcacaagctaagtacgaagctaatcgagcccactgtcatcgacctttgaaactcgtcggtgtcgctgattttatctcataaaaaatatgtagttgataatattaacaccataaaaaaacgactctcatttaatgagagtcgtttgaccaacagcaaagagcttattggcgagtttcgatatctaattcagcaaatgcttttgtaacgatatcttttaattgttttgcagaacggtgcatgctttccatttcgtggtctgtcaatggaatttcaaggatgcttgtgatacctgagcggttaataacagcaggtgaaccgataaagatatcgttcaagccgtattggccttccatgtatacagataatggtaagacagcattttcgtcgtctaagatagccttagtaatacgagctaatgcagtaccgataccgtagaatgtagcaccttttaagttaatgattgtgtaagcagcgtcacgaacactttcgaagatcttaacaagttcttcttctttaatttctggatgagctttaacccattcagaaatcttgataccaccgatgttagcgtgtgaccatacagggaattctgtatcaccatgttcacccatgatataagcatggaccgaacgtgcgtcaacgttaaccatttcagcgatgtctttacggaaacgagctgagtcaagtgatgtacctgaaccgataacgcgttctttagggaaacctgataatttccatgtagcgtatgtcaagatatcaactgggttagcagcaactaagaagataccgttaaagccagattcaacgattgggtcaacgattgtcttcaagattttaaggtttttacttactaagtctaaacgtgtttcacctggtttttgtggtgcgccagctgtgataacaacaacgtcagcatcttttgcatctgagtattcagcagcatagattttcttaggagaagtgaaagctaatgcatcagataaatcgattgcatcaccttgtgttttttctttaaagatatctacgataccaacttcttgtgcaataccttgtaaagttaatgcataagcgtaactagaacctacagcgccgtcgccgacgaggataactttttggtgatctttttcaatgtttgccaatataatgacgtcctttctgtaaatcaattcttcatttcgaaaaccagtatagcataatttacaccaaagttcgcgatttttggttaaattttcagaaaactatttctttcacaaagagagaaataaactgaatatggtataatggttcttaatatcaactggcgactggggagaattaactgctcagaatttttgcgtgatagcgccagtcaaaaagaggacgttaataatgaaaatgattgttggcttgggaaacccaggcagtaagtatgcaaagacaaaacacaacattggttttatggtgattgatcaattatgcgaacggtttaatgtgaccttaaacaagcatgattttgaagctgaatacgggagctttaaatatgaaggggaaacgattttcttagtgaaaccactaacgtttatgaatgattccggtcgttcagtcgggcctttaatgaaatactaccaagttaacctagatgaattagtagttatccaagatgatatggacttaacgctaggcaagttgcgcttacggcaaaaaggttcagcgggaggccacaacggcattaagagtatcatcgcaagtgtccaaagctcagaatttaagcgtgtcaaagttgggattcaacatccacaaaaaagtacagtcgttaactgggtcttaacgccgtttgacaaagacagcgcaccaattatcaatcaagcactagaccaggcatgcgaagcactagaagactggtgccaaaacgacgacttcatgaaaacgatgaataagtttaattagagtgtcgttggcagttggtcagattctgagcatttgcctaacttggcgaattgacgctgcaagcggcgatttgaaaagtgtagcaaagcgcaggaatctactgccaatgacacgtttcaaaaacagagtgcgtttggttgcggttagcaacagagcattaataaaaatttcaaataatcgaggttttaggattatttgaaattttagattaagcggaagttgttgcaaccaaaaagtacgtttcaaaaaacagagcacgtttcttcgcgccattataataagaaagtaaaggaacttttacatggatttaatgacaatgctggggcagaccaaacaggtgcaatccgttttaaagaatcaacgaccagggattaaacaactacttacagggctttcgggatcagcgaaaaccctgtttttggcgacgatttataaacaacaacccttattgattattgagagtaatacgttccaagccaatcaagttgctgatgatttgagtaatttactcaatagtgatcagatttacactttcccagttgaagaagtgatggcggctgaaatggcagttagttcacctgagtccagagcggaacgtgtgcgaacgttgagttttttagcaacaggcaaaaaaggaattgtgattacatcggtcgcgggcatgcggcggttattacctacagcgcgtcagtggcaagatagtcaactcacaatcaataccgatagtgaagttgatccccaggcacttgctgcgcaacttggtgaaatgggttatttccgagataagttggttggtaaacctggtgagttcgcaatgcggggggatattattgacatttttccactggacgcggaaaatccggtccggattgaactctttgatactgaagtggattcactgcgttcttttgaagcagatacgcaacggagtattgagaatttagatagtgttcaaattatgccggcgactgacttattggccaacacagcacaattggaaatggctggtgaggcattacaagcagcttatgaggcggttgcggccaaaataacggataaaactgaacaaaaacaattggcgacaaactttgaaacaccgattgaacggttgttggccggtgaacgcgttgagaatttagcgttgtttgttgattatctgtatccagatcaatcaagtctgattgattactttaaaaagagtggcttagtgatttttgatgactatccgcgcattttagaaacgcagcggattttgactgaagaagcggccaactggcaaaccgatatgttggaaacccaccgcatgttgccagaccaacgactcatgatggatgcccaagcgctcatcaaaaaagatacacatgcgcatctctatctatcactgttccaaaagggaatggggaagttaaaactcgatgcactcaacaatttacccacgcggacggtgcaacaattctttagccaaatgccgcttttgaaaaccgagattgcgcattggcaaaagcaaaaacaaacggtcattgtgctcgtgtctgatcctaaacgggtcaagaagattgatcagacgttccacgactttgaaattgatgccgtcatcgccaataagactcagttggagacggggcggacacaaatcattcaagggtcacttcaaaatggctttgaattaccggatttaaaactggtggtcttaactgaaaaggaactgttcaatacggcgccgaagaaaaaagtccggcggcaaaccttggccaatgcagaacggttaaagagttataacgaattaaaaccaggtgattacgtggtccacgtcaatcatgggattggcgaatacgtcggcatggaaaccttggaagtcgatggggttcatcaagactacatcaccatcttgtatcgggataatgggaagttatttatcccagtcactcaactcaatatggtgcaaaaatacgtctctgccgaggccaaaacaccgaagattaataagcttggcggtggcgagtggcaaaagactaagagtaaagtttcggcaaagattgaagatatcgccgatgatttaatcgaactttatgcgcaacgggaggctgaaaagggatttgcctttccaaaagatgatcaattacaggctgaatttgaaggccagttcccctatcctgaaacagatgatcaattacgcagtaccgctgaaatcaagcatgatatggaacgcgtccgtccaatggatcgattattagtcggcgacgttggctttgggaaaacggaagtcgctttgcgggcggcttttaaggctgttgaagccggtaaacaggtggcctttttagtgccaacaacgattctggcgcaacaacattatgaaaacatgctgacacgcttcgcggattttgcggtcgaaattggtttactgtcacggtttaaaacgcgcaaagaagtgacggcaacgctcaaaggcttagcagagggcaaagtcgacatcgtgattggcacccaccgcttgttatcgcaagacatcaagtttaaagatcttggcttgttgattgtcgatgaagagcaacgctttggtgtaaaacacaaagaacgacttaagcagttgaaggcacaagttgacgtgttaacgttgacggcaacgccgattccacggacgttacacatgtcgatgctcggtgtgcgtgatttatctgtgattgaaacgccaccgactaaccgctatcctatccaaacgtatgtcatggaacaaaatgccggtgcgatgcgtgaagcgattgaacgggaattagaacggaatggtcaagtgttttacctccataatcgagtgagtgacattgaacgcacggtcgatgagattcaagcgctggttcctgaagcaacggttgggttcgcacatggtcagatgaccgaggcacaactagaaggtgtcatctacgactttgtccaaggtaaatacgacgtcttggtgacaaccacgattattgaaaccggggttgacatgcctaacgtcaatacgatgattgttgaagatgctgatcattacggtctttcacagctctatcaattacgcggccggattggacgtagtagccggattgcttacggttactttatgtataaacccgataaggttttaacggaagttagtgagaaacgacttcaggccatcaaggactttaccgaattagggtccgggtttaaaattgcgatgcgtgatttatcgattcggggagctggtaatttattaggtaagcaacaacatggttttatcgattctgttgggtttgacctatactcgcaaatgttgggtgaggccgtcgctaagaaacaagggaagcaagtcgttgctaaaacgaatgccgaaattgatcttaaactagaagcttacttaccagacgcgtatattaatgatcaacgccaaaaaattgaaatttataaacggattcgccagatggattcagaagcggcctttgatgaaattcaggccgatttaattgaccggttcggtgattatccagatcaagtcgctaatttattagcgattggtcagttgaagatgaatgcagatgacgcgttaatcgaaaccatcaaacaaacgaaagaaatcattcaagtcaccttatcggcgaagggcagtcgccttgtttcaggtgaacaaatttttgaagcgttatcgacaacccgcttgaaagcaacggtcgggtttgaacaagaacaattaagcgtgaaactcgtcatccagccgaagatgcaaccggcagattggttgagtgaagtggcaacttttgttacaagtctcttgaagatagaacaaaagcacacggaacaaccaacggattaggcacgctaagtggaggccaggcatgcaaaataaacagatgcaacatctgatgaaaggcgcggtcattttatcaattgcgtcgtttatcgcgaaggtattaagtgccgtttatcggattccatttcaaaatatggtcggtaacaccggcttttacgtgtatcaacaagtctatccaatctatggcattggcatgacgtttgcacttagtggctttccagtttatatttcgaaactggttgctgaacaagtcaatccggaggaacaaacgcagctgttaagacgctcatttgcactgttaggcatctttggtgctgcaatcttcatttatttacagtatcaagcgccgaaaattgcgggggcgatggcggatccagcattaacaccgctgattgaaatggtatcgtttatgtttttattgatgccgtttctagcggtgacgcgggggtacttccaaggaattttcaatatggtaccgacggcggtttcacaagttgctgagcaactcgtgcgggtcgtggtcatcttggcggcagcgtggctatctttgaaactgcactggtcagtgtatgaaatgggcacatgggcgatatcaggcgccttctttggcggcttggttgcaacctatattttattacggccagcagaaaccgcctttcaactcaaggcgccacaccgtggtggcatcgattttaaggcgtatcaacaattggcaaaacgcttagcgattgaaggcgggtcaatttgcctctttgcttcattaattgtgttattacagctggttgattccttcacagttaaaaaagggttggtcctcagtggattatcggaagaacttgctaagaatatgaaggggatttttgaccgtgggcaaccacttgtccagctgggattagtcgtgtcacttgccttctcatcaacgttgattccgagtctgtcacaagcgcggcaacggcggcaacaatatcaatttcaacaagttgctgaagcgctgattcatatcagtttaggtttatcggcagcagcaaccaccggcctaatggttttgatgccgcagattaattatttcttattcggggatgctgatggtaatcaggcattggtttggtatatgttgagtatcgcaatcatcgcgctgatcaatgcttgcaactcggtgctccaaagtcttgatcagttccataaaacaacggcagccttaattgttgggttaatcgttaaagtagcaatcaatcaatggcttgtgcaacactatcaaattgttggcgcgagtgtcgggactgttatcagcctcggtgttgtgttagccttaattttacggcaatcaccagtgattgtacggcaagcgcttggtttgcaacgctttaccggtaagttacttgcgatttgtgcagtgatgtggctgggtgttaagattgcgctacagtttgcaccacaatcacttagttccagaggacatgcgattttagggacgggccttggcgtactcgttggtgtgctcctatttggcggattagcattacggtggcaattattctcgattcgagaatggctgacgatgccaggtggccggcaactattgcgcctttcgaaaaaaataaaaggtaggacaaaataatgcgcttagataaatttttgaaagtatcacgaatcattaaacgacgttcagttgcgaaagaaattgcagacaagggtcgaatcatgattaatgatcgccctgcaaaatcttcaagcaatgtcatcgtgggtgataaactggaaatcggatttggtaataaaacgatggtcgtacgcatcacacagatcatcgaaactacgaagaaaagcgatgcagctgaaatgtatgaaattttggaaacaagacaagctgaaaactttgattaaggaaaaagcgctggccgaattaatatgggccggtgcttttttttgtgactttgttgagcatcttaataaaagtcattaagaatctgggatcttagttgacgacctttttgtgaaattgctataatgaacttaattccgagatggggggcttctaagtgagtcgaaaaattgcgaaaatcgagaatgcatttacccagcaacaagcagcccagaaaatcgtgcaagacaaggcagcccatgttaagcgtgttcataaacaccgcttatgtggcttggggattgttgcagtattagtcgtcttaatttgtggtgtgcagattttccaaacccatcattcattggccgagattagagaaacaacggcagctaaagaaaagacattaaaaaaagctaaagcaactgaatctgatttaaagattcaagtgcaacagctgcatgataatgattacttggccaaatacattcggtacaagtattactattctaaagacggtgaaaccatcttcagtttgccccaggacaaggcgcctaatttaaattagcaacaaaaataattcagaatacgaccttgtttcaagggcaaagcgtgctatacttattttattaaatatcacgcttaagtgattaaaagtttgacgagttcaaacgaccatttaggaggacgtagttttatatggcagttgaagttggttcaaaagttgctggtaaagtaacgggcattacgaattttggtgcttttgtagatttaggtgaaggcaaaaccgggttggtacatattagtgaagtgtccgatagttatatcaaagatattcatgatgttttaaccgttggtgatgaagtcacggtgaaggttatgtcagatcaaaacggtaagattggtttatcaatccgcaaagccgttgatcaacctaaagtgcaagaacatccgcgccctcaaagtcgtccaaataataatcgcggtggatatcgcaaaccagagcattcaagcgcacctaaaaaagaaggctttgatgatttattatcagggttcttaaaagatagtgaagatcgcttatcaacgattaaacggaatacagaaggtaaacgtggtggccgtggcggccgtcgcagttaatagaacaaattgataaaggttggcttgaaagtttagtgatagactttcggggcaacctttatttcatttcaagtctgtgttggagaggaatcggtatgttagaacaagcatttcaaatacatcttcaaaaagagcagttctggcaagccggcgacaaggttgtggtggcaacgtcaacgggagtcgattcaatggttttattgtggttattgactcatctgccccaaaaacaacgaccccaagtcgttgtggctcacgttaatcatgaattgcgtgcgcaaagtacggctgaagaaaaatatttaacccagttttgccgattgcatgccatcccgttacgcattcaacattggccaaaagcgagtcatcctgaaacaggggttgaagcggcggcacgtcaatttcgctatgctttttttgatcaagtcatgcgaaccgaatcggcgcattacttggtgaccgcgcatcacggcgacgatcaactagaaaccttgctcatgaaattagttcgtagcggtgaattgcatgaaatgcgggggattcggcaagtcagaccgtttaaaacggggacgttaattcgcccgctattaccttttagtaagcaacaactgcgtgattacgctgatcagattggtttgaggtattacgaagatcaaaccaatcaggaacaaactgttcttcgtaatcggatgcgacatgcggtggtgccacttttaaaacgagaaaatccacacttgattcaaaatgccaatcggttcagtcaaagtctgacccaaatggtggcacaccaagatgatctaaccgcggcgttactgccattgttggcaatcaaaaaacagccggcggcaattgaagggcgtttagaccaactcgatggcttgaaccagacacaacaaagggcgctctggcaattggtgtggcaacgatatttcaagactttaccggcgttaaaggcagcccagttaatgcaagtgcaacaattgttggcgaacccgcagaaaccgcaaggccaagtggcattgaacaatggcatcatttttgaaaagcagtatcggtgttttcggattggtgtccaccaaatagtggattctttggtcaaaacacgaacattagcgattaatgaatggctgcggttaaaaaatggcgaacaagttggtgttttcgatatcgaccatctacctaatcaagttcaacggcaacaggtcgtttggttagcaccagaggaatggccactgcaactcagggcgctacaagcaacagatcgaataatgcttgataaggcacaccacaaaaccattcaacggttatggattgatactaaaaccccacaggcaaagcgccaaaatgcatgggcggtttggaccccaaatcaattgcttggccggccggatttacggatttcggcgttgtttaatcgcgaacaaactggtaaaatacggtacatactatgttatttagatgattaagcaaattacggaggctggcacaatgttagaaaaagatattgaacgcgtattatattcaagagaagacattcaaaaggttaatcagcgcttaggaaaacaaattacagcggattatcaaggtaaaaacccgttattaattggtattttaaagggtgcgatcgtcttcatgacagatttgattcgcgaaattgacctccatgttgaaatcgactttatggatgtgtcaagttatggtgctgagaccatctcgtcaggtgaagttaaaatcatcaaagatttagatacgagtgttaaaggccgcgacattatcattatcgaagatattgtagatactgggcgcacgttgaattacttaatggcaattcttaaaacacgtcaagcaaactcaattaaagtctgcacgttaatggacaaaccaagccgtcgaattgtgccagttcattcggattatgttgggatggaagtcccaaatgaattcgttgtggggtacggattggactatgccgaacgatacagaaatatgggaacaattggcgttttgaaacctgaaatttattcgggtaaataaatggtcaataaaagtcagatatgttatagtttaacagtgtcaaaaggacactgtgtcacaaatgatgagaagcttcaggaggtcacgtatgaacaacaaaaagaatggactgtttagtaatagtctgttttacattattatcttagtggctttagtcggtgtgttctcgttcttcatgaacggtaacgctggatcagagtctaaggaagttcaatcaagtacatttttaagtgaattgaagaccaataaggtcaagtcattctcaattcaaccaacgaatggtatttataaaatttctggagaatatcgtaaagcacaaaaaacagaacagcctaaaaagaatcttttaggacaaaaaacaaaagcaagatcagttaaacacttcacaacaaccttattacaaagtgattcacaagttggggcaatgaccaagttagctgacaaatcagcaaccaaggttgaaacccttcaagaaccacaatctggttggtgggtaagtattttaagtcttgtattgccattgatcatcatgtttggtttattctacatgatgatgggccaagcgggtcaaggtggcggtcaaggcggtcggatgatgaactttggtaagtccaaagctcaaaaagccgacaagaaagctaataaagtacgtttctctgatgtcgctggtgcggaagaagaaaaacaagaattagtcgaagttgttgaattcttaaaagatccacggaagtttgctgcattaggggctagaattccagcgggtgttcttttagaaggacctccaggtactggtaaaaccttattagctaaagccgttgccggagaagcaggtgtgccattcttctcaatctctggttctgacttcgttgaaatgtttgtcggtgtcggtgcaagccgtgtccgtgatttattcgaacaagccaaaaaagcagccccatcaattatctttattgatgaaattgatgctgttggtcgccaacgtggtgccggcatgggcggtgggcacgatgaacgtgaacaaacattgaaccaaatgttagttgaaatggatgggtttacggggaacgaaggcgtcatcgtcatcgctgctactaaccgttcagatgtcttagatccagcgcttttacgtccaggtcgttttgaccggaagatcctagttggtcgtccagatgttaagggccgtgaagccatcttgaaagtccatgctaagaacaaacctttagccgatgatgttgatttgaaagaaattgcgcaacaaaccccagggttcgttggtgctgatcttgaaaacttattgaacgaagctgctctagtagccgctcgtcgtagcaagaccgatatcgatgcttctgatgttgatgaagctgaagatcgtgtgattgcgggtcctgctaagcgggatcgcgtgattaatcctaaagaacgtgaaaccgtggcttaccacgaagctggtcatgcgattattggtttagttcttagtgattctcgtgttgttcggaaggtaacaattgtccctcgtggccgtgctggcggatatgccatcatgttaccgaagaatgatcagttcttaatgagtaagaaagaattaacagaacaaattgttgggttacttggtggtcggacagctgaagaaattattttcaactctcaatcaactggtgcttctaacgatttcgaacaagcaacggatattgcccgcgggatggttactcaatatgggatgactgataagctcgggacagtggcccttgaaaaagaaggtcaaccattcgttggggcagcttacggtcaaggcccagccttctccgaaacaactgcggctacaattgatagtgaaattcgtcggattattgacgaagcacatcaacaagcacacgaaattattgaagcgcaccgtgaacaacataagttaattgcggaaatgctcttgaagtacgaaacattaaacgaaaaagaaatcttgagcttgttcaatgatggtaagatgccagaaaagaacgctgaagaatttccaagcgaaaaagcagctacttttgaagaagctaagaaggcgcttgaagcaaaagaagccgcaaaagaagattcagaaaaagaaactgataaaaaggatgtgacaatcacacctgatgaagatgatcaatcgacaccagctgaggataatcaacatccagacgatgaagcataaattgttacaccaaaaaggtcgacacgattagtggtcgacctttttgcatcaatccataaaagaggttatttagatgacagattatttaattaaacaaatttcagaagatggccaacttcgtgcttatgcagtgaacgcaactgatgttgtaacggatgcgcaagaaaaacatgacacatggtcaacttcatcagcagcgtttgggcggacgattgtcggcacccttttattgagtgccgctggcttaaaaggtgatacgaagatgacagtcagagttgaaggtgacggcccagtcgggaagattgttgtcgatgggaatgcgcaaggcacagttaaagggtatgtgacgaatccacacgttaacctaccattgaacgacaaaaataaaattgacgttaaaggtggcgttgggacaactggtacgttgagtgtcacgaaagatcttggcttaaaagaaccgtttaccggtcaagtaccattggtatcaggagaattaggtgaagactttacttactaccttgctaaatcagaacaaacaccatctgcagttggcgtttcagtcttcgttaatgaagataactcaattggtgtcgctgggggcttcatgattcaaattctcccaggggcggatgaccggttaatcgatatcttagaagcgcggctgaaagaaatgccgctggtgtctgaattactccaacaagggatgagcccagaggaaattatcactgaaattgtgggcgaactcccaatgaagacgttagaaaaaatacctgttaaatacgaatgtgattgttcaaaggatcggtttgcaaaggcactcagttctgttgcgccagcggatttacaacaattaatcgatgaagaccacggtgctgaagcggtttgtcgtttctgtggcaagcaatatcaatttacagaagcagaactaaaggcaattttagccgcgcaatagaatagtcgcaaatttttgcctgaatactatttttttgctatgataatttggatattgtcggaagacacgaagggaatgggttggcattatgacatggcaaataggagacgtgacgattccaaatcaagtagtcgtcgcaccaatggctggtattacaaacgcagcatttcgcgtaactgcaaaggaatttggcgcaggtttagtggtctgtgaaatgatcagtgatcgcggaattatgcacaataatcaaaagacaatggggatgatgtttgttgatccgaacgaacatccagttagcatccaaatttttggtggttcaaaagacaccttagtggaagccgctaaatttgtggatcaacatacacaagctgatattattgatatcaacatgggttgtccagtgaataaagtcgttaagacagatgctggcgcgcgttggttattagatccaaacaaggtttatgaaatggtctcatacgtgacagacgccgtgaagaagccagtaacggttaagatgcggacaggctgggatgaagatcatattttcgctgttgaaaatgcacttgctgccgaacgtgctggtgcttcagcacttgcaatgcacggtcggacacggaaacaaatgtacaccgggcaagcagactgggacattttaaaacaggttaaatctgaattaacgattccatttatgggtaacggtgatgtccggacaccacaagatgctaaacgtatgctagacgaagtgggtgctgatgctgtcatgattggccgggctgcgctcggtaatccatggattttaagccaagtggaaacctacttacgaacaggtgaattgattgctgaaccaaccccatgggaaaaaattgcaacggccaagttacaattacaccgtttagtcgaacttaaaggtgaaaatgtggcttgtcgtgaattcagacaacaagctgcctattacttgaaagggattcctcgtgcggctaagaccaaagcggcggttaacgaagtggaaacggaacaagccgttggcgatattttagaccgctttgtagaagaaaccgaagcgagaatggcaaattaggttccttatgttggtgttttcgtgttaaaatcaacattagtagataattgaatgtatggaggaattgtcagttgggacaaaaagataatcaaagagaaatgaacgaccaactaaaggtccggcgtgaaaagttacaattgttaaaagatgaaggaattgatccttttggtagtcgttttgatagaacacatatggctgcggaattacacagtgaattcgaagcaattgaaaaagacgatttagatgctaagaatctagaagtcacaattgcagggcggatgatgtctaaacgggggaaagggaaagttggctttgctgacatccgtgaccgttcaggtaaaatccaaatttacgtgcgtaaagatgaagttggcgaagaaaactatttaattttcaaaaaggctgacttaggtgatcatttagggattactgggcaaattatgaagactgacatgggtgagttaactgttaaagcaacgcacctgactttcctatcaaaagcattacgaccattgccagataagttccatggtttaaccaacgtggaacaaatctatcgtcaacgttacttagatttaatcgcaaatccagagagcttggatcggttcacgaaacgcagcaagattatttctgctgtccgtgaatatttagataacaatggctttactgaagttgaaacacctgtcttgcatggtcaagctggtggtgcatcagcacggccatttattactcatcacaatgcgctagacatcaacttgtacttgcggattgcgcttgaacttcatttgaaacgattaatcgttggtgggatggaacgtgtctatgaaattggccgcgtattccggaatgaagggattgatacgaaacacaatcctgaatttacgatgctagaaacatatgctgcatactttgattataaagacgttatggatgaaacagaagggatcatccgatttgcagcgcacaaggttttaggaactggtcagatttcatatcaaggacaagcgattgatcttgatggtgattttggacgggttcacatggtcgatgcaattaaggaaaagacgggtgtcgatttctggcaaccaatgacggttgaagcagcgcgtgaattagctgatcaacaccacgtgaagtatgaatcatactggcaagtggggcacatcattaatgcgttctttgaagaattcgtggaagatacattggtacaaccaaccttcatctatggtcatccagttgaaatctcaccattggctaagaagaatgctgaagatgatcgtttcacagaccgttgggaattatttatgcacggtaacgaatatgcaaatgcctttactgaattaaacgaccctatcgatcaacgtgaacgttttgaagcacaagctaaagaacgtgaaaatgggaacgatgaagccgaaggaatcgatgaagattacatcgaagcattggaatacggaatgccaccgactggcggacttggaattgggattgatcgactagtcatgttactgacagatgccgcatcaattcgggatgtcttattattcccaacaatgcgtccagacaacaataataacgattaagattaaactaaagcccgcaagcagacgatttgcttgcgggctttttttattgaaaaaaattgggattataaaaagtttttttagtgtattttgtgggtgaataagcttcaactttcggtatattatgttgtttgcgcgagttgttcgtttaatagttcatttatttgcataaattgcggatactagcgactgtttagattatgaaagttcataaataacagttgagattaatagttgacgaaaggctgtagagctgatatagtagtctatgttgtcagcgagataaaacattgttgctaacgagtcaggtaattaaatcagtttgaatatttattcaaaaaacatttaaaaaaaatataaaaaggttgggccgaaaggtttaaccttttttgttaccatcagttttttccaagagagagtagtgatcaacctgcagctattagctaatgagatacttagtgttactcaggatgtttacgtggcctatgaagaaccctactagctgtgagtaggattaagctaagtaaaatatagcgcatcgtaattaaaaagccgtttaacagtcccttatgggatggttaaacggctttttgctatgctaaggcgtcattttctgtttcctgataacgttgcaagatgtagattgctaggataactagaattgcaccactcatttctacccaactaaagcgggcatggaagaagatgatacttagaataaatgtaattacaggttgtacggcatcaacgatactgattacggttgatggtgcaaagtttaaactgtgtaacaagcaaagatatgcgaatacagttccaatcaaaataacggctaaaattgcgataataccggaagcatttaaacgcggcggtgcttgccagaatggtcggtggatattgaagagtaaaccactgatgaacatgccccaacctaaaacgagaattggtgatttttcattaacgattggtcttggtagcacaacgtagaaagcagctgttacaccggataagattccccagattaatgaattaaaaggaattgttaaagtatggatattgcctttcgtaatagaaaggaaaacgccaattaaagcaattccgaatgagataatatcaattcgatttggccacttacgtaagaaagcgagggttccaataacgataaacagaggacttagatattgtaaaatagtcgccgctgctgcattccccgtttggatactcatgaagaaagtatattgattacccatgataccgaaaagggcgtaagcgattagccaagccgttaatcgttttgatttaaaaatggagaagatatcttgtttgaacttaattgccccgataagtaataaaattaaaccagcgccaagcgttctaacggataggaaccaagttgcagggatcttttgtccttgcgagatgaattccaaaatagtacctgaaacgccccagagtgcggacgccatagtcgcccaaaacatgcctttggcgatgttttgcggttgagttcgattgttcattgtgcgccatccttttttgaaaatttataactatactattataagctaaatggcgtatttatgctatttgcaaaacttttttcattattattccccacaaaataataaatatggcagtgataaagcgaactggtcaacaaaagctaattaagttatgatgaataaaaaagtgagggattcagatgcaatacattgcgttattacggggaattaatgtgggtggtaaacggccagttaaaatgagcgtgcttaaaactgcgtatgaagcggctgggttcaccaatgtgcaaacatacatcaatagtggcaacgtgttatttgaagccccagaaacaggcttaacaaccttagcggcaacttgtgatcagattatggtggagacctttggcttttctgtgaatatcgccgtggtcacagctgaccagttgattcaagctgttgcggacgcaccaacttggtggggcaatatgccagatgtgaaacataatttaatcgtggcgattgcgcctaaaacgggggcggaattgagtgtacatgtaggggcaattaagccagcgtatgaaaaagttgccgtgaatggtccgtttattttctggagtgcacccgtgaaaacattcggtcggacgcggtggtcgactgttgctaaaggggacctataccagtggctgacaattcggaatgccaacaccgctcgtaaattagtggcactcgcacaggcactacgggaagcatgaagtggttagactcgcatcttcattaatattcatatatacttatagtaataatcaataaagaaatgagggacgcgatgcgcttatccaatttgaaacagacgattatccagatggggttgatcttgattgctctcgaaattattgcgattgggattcaactcttctttgccccccatgaagtagcagccggtggggcaaccggtgtggggatcttattagaagaattgatggggtggaagatatcaacagtggtgtttgtgattaacatcggcatgctgatacttgcttacttcttacttgataagaaaaccacgttaagaattctctttggtagttttatgctaccagtttgtttagctttaacgccccaaatgatggtggtggaagacaaactattagcaattattatcgggagtgttgtttacgctgccggaattgccttgttatatcgaattgatgcctcgagtggtggctcaacagtgccaccgttaattttcaaaaaatatttcaatatcaaaccggcattgagtttgctggtagttgatttactagtctgctttgcgaatgtgttcgtctctggttttgagacgttcatgctggcaacttgttcatcaattctgacgttgattacgatgaactatattgagaccgggttgaaccggaaaaaggtcctctatgtcatgagtaacgaccaattacctgaaattaaagcccatttaatcgaagaatctgatgtgggcgtgacgatttttgatgttactgggggctattctaatgacaataagcagatgttgatgctcgttgttgaaaatcaagcctatcaacacattattaatcgaattcatgaagttgatcctttggcatttacgattgtggctaacgtagccgaggtacgcggcggtagtttataaatttaaaaagggtcgagacaattgtctcgacccttttgtgtgttattgatgattaaagtagcgatcagcttttaaattattgatggtgagcatgataatcaagctgatgatatagagtgttgaaatgaagagcatcacggtcatcaccgaataatgatcaagtaaccaaccgataatcacgctcgaaaatccaccgatacagcggccaacgttcataatcacgttattggcggttgcacggacttcggatgggtagaggcgactgacaatcgcgccatagcctgcaaacataccatttgagaagtagccgacaattgcaccgacgaacaataaagcacccatgctattggggaaggttaagatgtaaacgcctgctgctgaagcaatcaggaataagacaaaagcaaaccgtggaccaattcggtctagaatccaaccgaaagtcaacatgcctgctgacatcccggcaatcgtcgctaacatccaagttgatgaaccagccacactgaggtgcatttgttgttgcatgatggttggtaaccagttcattaaaccgaagtaaccagcgatttggacgattgccattatcatcagcgcaactgtttggtaagctagttcgcgtgttttaaaaagagcgctaatctgaccttttggttgatctgattcagaagtgaacgttgtactttcgactagatgatggcggataaaaaaagtaatgataacaggtaataggccgaatagaaatagtgcatgccaaccaaattgtggtaagacccacgctgctagaagtgccgcggcaatagcgccaagttgacctgcgacacccacgaaggatgaaacacgtccgagctgtttcttagggaaagattcggctaagaccgtcatgccaatcccatattcgccaccagcaccgatcccagctaagaagcgacagagataaatcatgggaagggtgtgggcaaatgacatagccgctgtcgcaaaagcaaagataaaaatggtgtaagtgaatattttaatccgtccaacgcggtcggctaaaacgccaaaaaaaacgccacctaacaacattccgatattggtaatcgttgcgattaatcccgcctgtgtcccactgagatgcaaatctgcaatgatggacgatagggtgaaagacaagaacataacgtccatgttttcgagaccgaagccggccgtcgttgaggcgaccaccttagtctggtagcttgttaatcgatgttggctgtgtgccgtaatagttttcatattcagttttcctccaaaaaggacgctctctgtcgtcccttattttgcttggtgccaatcttagcacaggaaagtagtctgtgcaagggtgttatggaaaaagcgcaagcgtcctttgtgatataattgagtttataaaatggctcttcagcgatggagggcgttatggaggttattgaatgactgataagaaaaaacgctttacttttccgagcgcctacacagtaattctacttgttttactggcagtgatgatcttgacgtactttatgccagccggaaaatatgcgagtttacaatataacacgacccaggaaaacttcactgtggtcgcacccaatgggcatgaatcgacagcacctgggacacaagcaacactgaagaaataccacgttaatacggatttagcgaagtttaaggatgggtcggtgtataaaccagttgcgattccaaatacatatcaaaaactcaatcagcataaaccaaacttatttggcgcgattaaacaatttctgaatgcgcccattcaagggttatctgaaacaatcgatattatcacatttgtcttaattctaggtgggattgtgggcgttgtgaataagaccggtgcatttgcggccggaatggcggcgctatcgaaacgtttgaaaagtaaagaagcctggttaatcgtgattgtaacgagcttgattgccctaggcgggaccacctttggcttggctgaagaaacaattgctttctatccaattctagtgccaatctttatggcagctggctacgatgcgctagtcgcaattgcggcgatttatctaggcagttcaatcgggacaatggcttcaacggtgaacccattttccgtcgtgattgcttctaatacggctggcattagctttacagatggtatgggactaaggcttgtaatgctgattctaggcacattaatctgtattttctacacgattcggtatgctgaaaaagtaaaacaggatccaagccaatcgctcatttataatcaaaaagcagaattggaaaaacatttcctgggaaatagtgatgtcaatgaagtaccacggtttgatttccggaagaaattgatgttaattatttttgcggccggttttgtcatcatggtcttcggcgtgaaggaatggggttggctatttaatgaaatttcctcgttattcttagcgattacgtttattttggcgtttatttccggattatcggaaaaagattttgttagtgaattcgttgcaggggcttccgacctgttaggtgtagcccttgtgattgctttagcacgcggcgtgacgattattatggaacaggcacaaattagtgatacgctattgtactggttaagtagtggcgtttcccatatgagtggtgttatcttctcaacggtgatgttcttcgttttcattctactaggattcttcattccgtcgagttccggtctagcggtgctatcaatgcccgtcatggcaccgttggctgatgtagtcggtgttaatcgtgacgttattattagtgcttataactggggacaaggcattatgtcgtttatcacaccaactggtttggtcttggcctcgctggcaatggtccatgtaacgtttgataagtggttaaaattcgtttggccattaatggcgattattggtctattagcaattattttactcggtgttagtgtctatctttaaaaaacggtcaaaaaaggtccgccacaatcgtggtggaccttttttcgtgattagtaaactttaaatttcgttactggccagtagcggagtttgacaacgccttgaatcccgttgaaggttttagaatcatcactgacaaagcctacttcttcataccggctatcctttgaaacagtccggttatcacccatgacgaagtagtggtgggcagggactgtggaacgaccaagcacgtcctttaaatcaaagtttggcttattagtctttgggttgagtgtgaagtagtttgacccggctaggaaggttgttggatcttttttataatcatttaaataaggctcactgacttttttattattaatatagagttgatccttgttgaagcgaacagtttcaccgggcatgccgacaattcgtttaatgtagaattcacctggtgaatcaggggccttgacgataacgacgtcgccgcgtttcagtttcgtatggcgtagtgcaatgacccgatcatactgtgtaaagttgggttgcattgatggcccgaaaatttgttcattggcaatgacgaatttaagcagtaattgcgcaatgccgaccatcacggccgctaataaaatgatttgtatagtggatttccaaaattcttttgctttagctgacatatcgcacatccttagaattcaatagattcattgtactacaattaattggtagatgacaacaaaactgtacagttccttaactattaaacgatcttttaaattagggaaacgccgcgttatttatcacgggaaacggttcgtggtatactgaaagggattattttaaacgacaggaaaagtgagtttaacgcatggcgaatttagtaattgtacgacatggcgagagtttagccaatcaattaaatacttatactggttggtctgatgtgccattaacggctgctgggcgcaaacaagcacagcatgtgggccgacaaattcaagcaaccggaattcaattcagtcatgtgcatacttcgttattgaagcgtgcaattttgacgagttacattattctggatgaaatagaccaattggccattccaatgacgaagagttggcgattaaatgagcgccattatggggcattgcgcgggttaaataaggaaaagacgcgggctatttttggtgcgcatcaagttgcccgctggcggcgtagttacacggcggtcccacctttattgacgactttttcgcaggcccgtcgttatcgactagttccaccgatgagtcggccacgcggggagagtcttgcacaggcaacgcaacggctattaccttattggcaagatcaagtagtgccaggattacttgcaggccaggatcaattgattgtagcgcatggttctactttgcgtgcgctcattaaggtgatcgaacagatttcagatcgcgatattgatggtgtggaagttgaaaatggtgaagcactgtattatcgattcgatgctcaaatggtagtcattgagaagggacgattagcggactaagcggatggacaacaaattgaaaagaggactgctgttggtagggctcatcctactaattattggcggcacgatttatcatgaacggcaaaaatatgccgtccaaactcaacaaacccaacaaaaaatgaaacaacttcagcaacaattacaggcaacaaaacttgagttagccattcaaaaggcaaaaagtcatgaagccgggattgatgatcgaaccatcaatcatttgagtgcgaaggaacaacaatttgtacagcagttgctacatgataacagttttagcgggaccattttaattgtgcggcggaatcatgtgttatttcaaggtggccggggctatgcaaattttgcgactaagcaactgaattctccacagacgacgtatcagattgcatcgattcaaaagtcattaacggctgcgttattgatgaaacaggtgcaagccgggaacatcgatttagcgacaccgttaagtcggtattacccgcagattaaagaggcggatcaaattacgctgaagatgatggttgatatgcgttctggactgactgaattatctgcaccagaaaaagaattatcagatcaagcgcggattcaatatgcgcttgatcatttggctgttaaagatattggtcagcataattattcgccagttaattaccttcttttggccgggattttagaacaagtcacccataagagttatcgagagttagttggaaatcagttgataataccgtttaaattaacatcgtttaattttatgccaaatgaaacgaccggccaacaagcgactgcttatggttatcaacaagacggctatggcacgccagttagtgaaccaagttacgtatatatgcgtgagttagggaccggaaatatgtatgccacaacgagtagcctctttcgaactgaacaggcgattgttcaaggaaaagtttttaaaaaatcgttattaaaaacgctccgctcatcgactactggtgaatatacgggtggtgtttataattacaaagattattttacaagccacggagtcgaatctggattcgaatctagcttgcagatgagtcaggatgggcgttcaggaattgtcttattatcgaatcaatataaggccaatccttcaatcggacttctaacgaatcaactttataagcagttaattacgctcaatcgttaaaaaagcagcttggcttaatgcctagctgctttttgtttggactgtaaaatgatgttgtgcaagtgtccaaaggccaaacccaattaaacagccaaaccagtttaagaggatatcactgagtgcgaaagtccctagataaaaggcgaattggagaatctcaatgcctagaatcgttaagagcgctatgatgttcgtttcaacaaatgaggctttcaaatggtacagaccgcctaatgggatgaagtaaacgacattcagtgcggcttcgagcagtgttttgtgatccttttgaatgaaatcgaacgggttcaagctaactgcatgatagacgtttgctttagtgaataagacaatgaataataagagcagatagacgctgtagacgagataaccatagattggcgatagttgtcggcggtcccattgcacccagcccaaccaaaatgtaagggttaaaaatagaatcagaaaaagcgtcgttgctggaaaacgggccataacccgggttaagcgtggataactgttgagtgttggtaagacaatgtgccacacgaagtagcgacttatgaggtaggcgaccacaccggctaaaccatattcaagtatcttgcgcattacgattcctccagtgattatagtttggtttgggcgaggcgtttagtgaattcagccataaagtcaaaatgttgtgtgtcggctaacgtatcttctaatttatttagaagttcgttgagcgcttgttgttcgtcgggggttaggctaccgaataaagtctccgtaaattcattgcgaccatcgagggcttcttttaaaaccgctcgaccggccgctgtaatgaagacgtgggtgattcgccgatcatgatgatcgggccgccgattaatgtagtgtttagactctaatttgtgcaagcattcggttagggatgaaggccgaatatcgagactttcggcgagggctccctgcatttgtccgttttcgatattaaggcgttttagaatgcgaatttggctgactgagcgatgatcggatgaaaattgcatgccataataatggcgataatggtgaatcaccttattgaaagtttggaaaagctcgttagatagctcggtcatggggactccttaataaagtttaatttgagatgctaatacgggtataatacgtcatttcataaggtggagcaatattgctcaggttttatcaagggtgttgtgaataattttacataataaccgcaaaaaaaacgatggttaaactgagtcagttctaaccatcgttttggggttgttattgagctgcttttaagaaatttaatgcagctgcataatctggttcgtctgtttgttcgataattaattcggtgtagctaattgtaccatctgcttccaaaataaagattgagcgttgaagcgtgttgttgcttggaacgtagagttgcattgctttcccgaaactgagtgcctcatcagaaaggagttgcatgttcttaacgccttctgcagcgcaccagttattttgttgttcgatggtgtttgttgaaattgtgtagaaatggacgtcttcgaattgatcgacggcttggttaaaatgctttgtttgaatgctgcaaacacgggtgtcaatgtctggcacgacgctaattaaagtccgtttaccgagcaattgcgcagaagtcaccgtttcgccagcggcatttttaaggtcaaattggggtaactgtgtgccgacggctggtggtgtgccgattgtatcgagtggttgatcatgtcttgtgatttgcatttgcataaacctcatttcataataaaagatgcttttattctaagctgattgtgctgagaacacaattaatcacgctcgaggagtatagaaaatgttacgtaaaaaaattcaaaccttatacgctaaaaagatgctgaaccaaattatcaaagaggtcaatgtcaaaccgctcgtttatgaaattgtcgatgcaagtgggactgaaaccgcggttttgctaagtcatgagcaatgggtcaaaatccaagccgcgttaaccgctaacaagtagcgtgaattcccgatttagacttaatacggtaactaagctgtaacatttctgtaatagttgaatgttacacttgttcttagttggaaaaccgtacataagttaagtatttttaaaaatgataaaggggaatcattcagtgaaaaaagtcagtcgattaatgttcagtgcactagcattcttaacaattgggtcaacaatggcggttagcattggtgcagtcagtgccgatgaagttgctgatacaaaagcatcaatgacaaaccttagtgctgaaaactcggctttattagctaagttaagtgctgcacaagataaggttgcttcaatcgacagccaagtgtcaaataagaccgttgcaattgatgatgcacaaaagaacattgcatcaacggacaaagaaattactgaagtggctcaaaaaatcgttaaagttcaagctgaagtccaatctagaaaagctgttttaaaagaacaagtaattgcgcttcaaaaacgtgctggggatagtgtttctggaaatgtttacgttgacttcatcgtcaatagtgatagtttctcagatatggtcagtcgtgcttcagttgttggcaagttaaaccaagctaacaaggaagcaatggacgccgtagcgaactcagaaagtaaattagctactttaaaacaagaacaagtgactaaaaaagcaaacttagttaacacaaaagcacagttagaaaaagatcaagcacagttaacatcacttaaagcagatgcagaaaatgaacaagcaagtttccaacaagaagtggatggacataagacacagcttgctagcttacaaagtcaattagatgctcaaacagcagccgctgttgaagctgctaaaaaagaaactgaaaaagcaacaatcgcaccaacggttgcacctaaaacaggttcagacaatacaccagcaccaacgcctgcaaaaacaacgacagttgcgccatctggtgcaaacactggttcattagttggcaatgccttacaattcattggcacaccctatgcatggggtggcgcacaacctggtggttttgattgttctggtttagtttggtacgctgctaagatggccggcattagcttaccacggacatcacaagaacaaagtacggttgggacaaaagtgtcattatcagaattacaacctggtgaccttgttttctggggtggcgttggttcagcacatcacgttgggatctatatcggtggtggctcatacgttcacgcaccaacagaaggccaaaatgtaacaacgatgtcaatgcaatattacaaacctgactttggtcgtcgtttataagattaaataaaagaataaaaaagtttggcgtctgcttaaattaagccgccaaacttttttatttatttaaatcctgaatagaagagtgtgaatgaatagtgacaaaacaactattagtcattacgggcgccacgggtagtggcaaaacaacggtgagccattatttaaaagaggcctttcaaattccacaagtggttacccataccacgcggcctagacggcataatgaagtcgacggggtggattattattttgaaacaccagacaccttggcacaaaagcacctcgttgaatcggtgagctattctggctatcaatatggctcttcacatgaagcgttagatttggcgtggcaaaaagcacagctgattagcctagttgttgataccaaaggggcacagacttatttagagacgttccccgaagaagcatcggtcttgttcttaacggtttctgaaacagatgcgttgattacgcgccttgaaaaacggaaggatagtcctgaagcaattcaaaaacggattcaaagtgctgaatttaagcgggatctgatgttaccgagtcatttaaatcaacgggcaactgtgttggttaacgatgactgggaaacaactaagcaagccttagcaacattaatcgcaaccctaaaaaattgatcattgaaaataaaaaggaagcctgtcgaacgcgttcgacaggcttccttttaacgtatggttaacccttatgcaaatgagtgttggttaaccgaattggttcgtttcactttataactgagtttttgtacggcttgttcaattgtaataccacttgcgctgattttttcattgttcgttgcagttgcgataaatttttgagtttgcgtatcaagtgaaacatgataccaattattagtttgactagtaaattccatcgtaaaatctcccttcaaatgactataaatactgatagaaggctaatgaagacgatttcttaaaaatcatctgaattacatcataacgcgcatcctgagataatgcaactattttgtattcggattcattaaaatttggtgaaatttagttgtgcttagctaacggttatgggattaagggtataatggtaaatagtgtggggtaacaactaaattgaagttggtagtaacaagcgccagcgcctgacaacctagaaagcatgtgctagaatggcgtatcgattaatcgagaggagcggatgtattaaatgagcgaaataaccactgccattgccgtattacgcgcaaatgggtacaaaattaccaagcaacgccgagagatgctacagtatttatcgggatatgaaaatcgctacattcccgtgactcaaatcgacgagcatatgcgcgccatttttccgggaatgagtcacaatacgatttatcgcaacattaaagattttgaacaacttggcttagtagaacaacaaacagagggtgaacaggcccacgttaaatatcaatgcgattttgaacatcgccaccatcatcactttatttgccgccagtgtggcaaagtgattgaattgaaaatgtgtccgttagatttttttagtcagcaaattccaaattgtcaaattgaaggtcatcagttcgaactctatggcctctgtgaagactgccaagcataatagaaagggagcgttaaaatggcatatcacacaccacccattattccaccagccgccattatttcgttaattatcgcaatgagtgcgaccaacattgtggcaaatacggttaaacctgttgaaaacaccaagacagagcagtcgtcatttgtttcaagtagtagtgcaaccacaggttcaaccagcagcatgaatacatcagaaccagaatctgagtctgaatcggaatcctcatcgacctctgaatcaaccgttaattcctcttctaaggctgtttcaagtcaggatcggacggatacggatgccaactcacaatcatctgatgatgagcagacaacaacaccacaaaatgatgagtcagctaacacgaccacggcaagcagtagctctgctaacacaagtagtagcgctaaagtggtttcaagtagtagcagtgccactgctacgcagtaataatttgttttacgcgcaataagggggacatttatcgtgttaacttttttagacattattaaccattatttcggttacttaaatattaatggtcgcgttaaaaatcgccttttttcagttatttgtttaattggtgatttttatcttctatataagagtgtgacctactttaaagctcaagcggttggacgaggtgtgattaacctcctcgtctttttggtgttattctattttgcagtgatgaacctgtatttctattatcggggcaaaaatgcggtcatcgatatttcaccgtatgttgaaaaagcgctgggtggtgatccaaacgcgccacatccactaaatggggtaaccgccaaaacgcaagtgatctcacaaattcaaccggccactggcttatttgaagaacaaaatctcttgcccgcgcaactaacaatggacgcggaacaaacccaacgtttaggatccttgattaacgaactgattgaatctggctatcttagcttgaattacgcaggcttaagtgataatgatatatatgaacaagcgcaacaattgcagcgaccaatttatgcgattgggaatcaagttgctttaccgttttatgaaatgaaacaagaagcagatcgttgggtgctctatggggggattaacgccattgccaaacaaccgttagcgcagattacgacggttggcttaaccccaatccaagacctatcccaagattatcaacttgcagtcgcccatacttggattacgggtggcccgaacaagatggccgggcgtagtggcgtggttgaaggcaatgatccctatcaattagtggttcagattgcgtaccaagaacgaacaaagtagtaagtggaggaaaataggtggagattcataacgaattcttagatgtcaattattgttaccaatactacctactagaattagtagcggataacggcaattattacttaacaggcagagaattacgaagtaattaactttagtcagttgaaaattagtgatgtgatttcacaagctattgaagacgctgagtctttcatgagtaatggtgaatatcaacgtgcctttgacagagttcacactgcttttcatggatatttaattgaaatactaaaaaaatatgaaattacagttcctagagacgaaaatctatctaaattatatagtaggatacaacaattaattgaaaaagaaattcaacctactgaacttgctgatatagtgaagacaacgataaggtcatcaaatggaatgattagctctcttaatgaagcaagaaataggcattcacttgcacatcctaatacaaatattattggaaagagagaagcaaaactaataataggtatttcaagtacagttacagattatattagcggataccttgataagtagcgtcattaactgattgctactttttttttgactatattttataaaaaggatgtgataagaattggaattgaaagtctatgtggcaaatttgggacggtataatgaaggtgaattagttggatcatggtttactccaccaattgatgaggaagaaatggcagaaagaatcggtttaaatgagaactacgaagaatacgccatacatgattttgagcttccttttgatgtggacgaatacacgccaattagtgaaatcaaccgtctatgtgaagccattcaagaaatcgaaggtacacctatttataatgaactcaaagaaattcaaggcatgtggtttagtagcttggaagaattactggaaaacaaagagaatattcattgttatagtgaatgtgattctatggaagatgtcgcccgttattatgtggaagaaacaggacaacttggtgaagtaccttctaatttacaaaattatattgattatcaagctttgggacgtgatatggaaatagagggaaattatcttatcacctctcatggagtatttgagtattctaattaacatggattactctaaactagcaatactgctataataattttatacgttctgaattaaggaggattgttcaattggtaataatagatgtttatgggaaaataacaaaaataaaattgtcagataaattgaaactatatatatctaatgtttctgatgactggaaggaaagcattatagaagacatgttacaagaaattcgacaacaaaaagttgacatggcagataatttgaaaaggtatggtaaaacatttcaaacagaatattctatatcttatttgaaagaaatcgttcacgccaatgttgaagactatacaaaatataatttagattctattgagtcatgtcttcaatgccttgttgataatatgatatgtctattctttgactatgaatatcaggatatgcctttttttgattggacaagcaattgctttgatggtcgtttttgtgaagaggattacgctgaaaaagtgatgtattttagtaactttgtaaatcatgatatacaaaatggtattcatatgaactgcatttatacaagtaatatgaatcctaaagagcatactaggatattatcaaatctaagttttagaattgattcaaactttaaagggtgcaggactacagacgactacattacggaacttaaaaaaatgggcaaccgaattgattctatactaaaatcggaaaacgattattacaaattagattatattatgaacgggatatatagtgataatagttataaccaaaatcattatttaaagacttttactttgttagaacttgtattattaaaaccaaatcagaatacaaatgaaattgacaaattactaataccttatcttgataagaaatatggagaggtttcgagtgaagtagcaaaattattaagacaaatgagaaataaaatcggacatggtgatttcaaaggttttaacgaaaaagcagaaaaattcgctcaaaaatttatgaaacactttcattttgactatacagaatacagtagattaaattgggtattacttcatacctgctgtcttttagatgatttactcagaataactatttttcaacaattaaaagtcacaaaataattattattttatagagcaatcacctattttgattgctctttttctatttttacggaaaggacgtgaagacatgaaaaaaataagaagttacaccagtatttggtcagtagaaaaagtgatttatgcaattaatgatttacaactcccttttcccataacctttacacaaatgacatggtttatcgtttctttgtttgtcgttataatctttggcagtttaccaccactttccttgattgacggagcactactcaaatacttagggattcccgttgtcctcacttggttcatgtgtcaaaaaacctttgacgggaagaaaccctatggatttttaaaatctattattacctatgctctacgccctaaaataacctatgctggcaaacaaatacgattaaataaagaaaaaatgaatgaatcaatcacgattgtaaggagtgaacaattaaatggcacaccccattaaatatatcgaagataatctcgtatttaatcatgatggcgaagtatttgcttattatgaattaattccctataattacagttttttaagttccgatgaaaaagttcaagttcatgataatttccgtcaattgattgcccaaaatcgtgatggtaagattcatgccctgcaactagcaaccgaatcaagtattcgagcgacacaggaacaatcgaaaaaagaaatcactggacgattaaaagagatagcttacgaaaaaatagatgaacagaccgaagcgttagtttctatgattggtgacaatcaagtggactatcgcttttttattggttttaaactcttgctgaatgaacaggaagtatcggtcaaaaatattggcaaagacattcaaaaagcatttgcggaattctttcatggcgtgaatcacaagttgatgggcgattttgtttctatgcctatgtcagaaatcgaacgcttttctaaaatggaacagttattagaaagtaaattatccagacgctttcacattcgcccattggggaaagatgattttgggtatatcattgcccacctttacggtcaaacagggattccttttgatgactacgactaccatttacccaaacgatatgaagataaaaaagtgttggtaaagaaatacgatattattaaacccactcgctgtttaatcgaagaaaagcaacgctacttacggatggaacaggaagatactaccacttatgtggcgtattttacgattaacagtatcgtcggcgaattggatttccccaatagtgagattttttattaccagcaacaacagttcactttcccgattgataccagcatgaatgttgaaattgttgctaataaaaaagctctgtctaccgttcgcaacaaaaagaaagaattgaaagacttggatagtcacgcatgggaaagcgacaatgaaaccagtaccaatgtggtggacgctttagaatctgtcgacgaattagaaaccaacctagaccaaaccaaagaatccatgtacaaactaagctatgtggtacgggtatcggcaaaaaatctggacgagttgaaacaacgttgtgatgaagtaaaagatttttatgatgatttgtctatcaaattagtacgaccttttggcgatatgctaggcttgcataatgaatttattccctcaagcaagcgatatatcaatgactatattcaatatgtcacgtcggattttttggctggtcttggtttcggagctacacaaatgcttggtgaaaattctggtatttacgtcggttacaatctcgatacaggcagaaatatttatctccaacccagccttgcaagtcaaggaattaaaggctctgtgacgaatgcgttagcgtctgcttttattggttcattaggtggcggaaaatcattctctaacaatatgctggtctattattcggtactctttggcggacaggcaatcattgtagacccaaaagctgaacgtggcaaatggaaagaaaccttacctgatattgcccatgaaatcaatatcgttaatctcacgagtgagaacgacaataaagggttacttgacccttatgtgatcttaaaactcccgaaagattcagaaagcctagccattgatattctcacgttcttaacaggcatttccagccgagatagcgagaagtttcctgtcctgcgtaaagcgattcggagtgtcactcaaagcgaacaacgagggttgttattggtgattgatgaattgcgaaaagaagatacacccatcagcaatagtattgctgaccatatcgaaagctttgtcgattatgattttgcccatctgttattcagtgatggcaatgtcacccaatccattagcttggaaaaacaactcaatattattcaagtggcagatttggtcttacccgattccaatagctcttttgaagaatacaccaccatggaattattaagtgtggcaatgctgattgtcattagtacctttgctttagactttatccactctgaccgttccatttttaaaattgttgaccttgatgaagcttggagttttttacaagtggcacaaggaaaagctctatctatgcgtttagttcgggcagggcgtgccatgaatgcaggggtctatttcgttactcaaaacgccgacgatttactagatgaaaagatgaagaataatattggcttgaaattcgcctttcgttccactgacctagtggaaatcaaaaagaccttagaattttttggcgtggacaaggaagatgaaaacaatcagaaacgcttacgtgaattagaaaatggacaatgtttagtttcagacatctatggtcgtgtaggggttatgcagtttcacccgatttttgaagagttgcttcatgcctttgataccagaccgcctgtgcgaaatgagggggaaaaatgacacaaaaacaaaagaaatttcttcactatagttggataacgctcctttgtgtgggcgttattttacttttattaggcacgctgggcaatgcagtacaagcaacaggcttagttgatgaaaccattgatacaagcaacgagtattccaagtatggtttaaatcattatcagcttgattattatgtggacaatagctggggctggctgccgtggaattggagtgacggcatagggcaatcagtgatgtatggactgtatgccattaccaatttcatttggacgatttctctttatctttccaacgccacaggctatttggtcaaagaagcctacgccttggatttcattagtcaaacgtctcaagcgattggtgagaacatgcagaccattgcagggattacaccgaatggcttttccagttcgggtttttatgtcggcttccttcttctttttattctgattgttggaatctacgttgcctatacaggactggtgaaacgagaaacgaccaaagctatacgagctgtgttaaattttgtggtggtgtttattctatcagcttcctttattgcgtatgctcccgattatattgcgaaaatcaatgatttttccaaagatgtgagcactgccagtttagatattgggacaaagattgtccttcccgatacggatagtcaaggcaaagacagtgtggatatgatacgtgatagcctattttctgttcaagtcaagcaaccgtggttattacttcaatatggctcaaccgatatagaaaccttaggtgaagaccgtgtggaaaagttattggctaccagtccagatacaaacaatggtgaagatagagaaaatgtagtgattgaagaaattgaagatcatgacaatacctatttaacactcccgaagaccatttcccgattaggaacggtcttctttttgtttgtattcaatattggtatctcgatttttgttttccttctaacaggaatcatgattttttcgcaagtgctatttattattttcgctatgtttttgccaatcagtttcctattaagtatgttgccgagttttgatggcatgggcaggcatgccattaccaagttatttaatgtgattatgacaagggctggtattaccttgattattaccgttgcctttagtatttccactatgctttattcgctgtcagcaagttctccctttttcatgattatgtttttacaaattgtgacctttgcagggatttattttaaactgggcgatttaatgagcctattctctttacaaagcaacgactctcaaaacatgggcagacaagtgtttcgcagacctcgtcaaatgatgaatcgacaaaccagaagatttcaacgcagtatgagtaagatttttcgtggaaaagcagggtcaacgaagcaaaagacaatgacaacaaagcagaatcaaaccaataaagctaaccatactcgtcaaaatgaacggactacaccaaagaaagaaacagcactttccaatgtgaaaaagcaacaaggcggtatcgggcaacgattaggtgaaaagacagcccatgtattggacacgaaaaatcgtctagtcaataaaagaaagcaggctaaacaacagatacaggcgacaccaacccatgtcaaatatgcccttcatcaaggaaaagagaatgtcactcataatgtaacagactttaaacaatctatggcagataccaaagctcaacgcaaacaacagcgtatgaaccagcaggagcaaaaacgaaagaacattgctcaaaagcgtttggagctggataaagcaaaagaaaaaagacgaaaagaaaacccatcatctcctgttcagaataaccagcagcatgttcgcaagcgtcagcaaaccgtcacgcctgttttgtcacaaaacactaaacgtgaaaatcatcagcgaccattgaaaaaagagcaaaaacaaaagacaccaccgaagcaattcaatcagaggaagctaaataaaagaacggataagcgaggacaacaaacatgaagctaaaaataacagtgatttgtagtgtggtcttctctctcttcttttttctcttattattcctagtcattttctttgcagatgatacggacagtggcgaaaacaacaaggattcttctatttcacaaggcggtgtgaccgtttcaccagaagtgttggcacaccgtccgttgattgaaaaatatggtaaggaatatgggattgaagactatgtttcttatatcttagccattatgcaagtggaatcgggcggtacagcagaagatgttatgcaaagttccgaatctttgggtttaccgcccaacagtttgagtaccgaagagtccatcaaacaaggggttaaatatttcagtgaattattaaccagtgcagaacaacaaggagtggatatagattctgttatccaatcttataattatggcggtggctttttaaattatgtgaggagtcatgggaaaaaatatacctatgaattagccgaacagttttctaaagagaagtcgggtggtcaaaaagcagactatcccaatcccatagccatacctgtgaatggtggttggcgatataactatggaaatcagttttatgttcagttggtttcacaatacctaaccgacacttccccaacagaatttgatgatgaaaccgtgcaagtcattatggacgaagccttgaaatacgaagggtttccctatgtctttggaggggcgtcgcctaccacctcttttgattgtagtggcttaatacaatgggtgtatgacaaagctggcatttctctccctcgtgtcgcccaagatcagtatgacgctacgcaagaaatctctatggaagaagcccaagcaggcgaccttatcttctttcattcaacctataatgcaggcacatatgtgactcatgtggcgatatatttagagggaaatcgcttttatcatgcaggcgacccaatcggttatggcgacttaagcagtcgttattggcaagaccatctgattggggctagacgtgttattcataactaagaaaggaatgaatcaaatgattataaaaatcgagcgaaaagaaaagaaggagaaaccaaagaaatctaaaaaaccgagcaagcaaagaaaagttccgatgattaaagttggcacgcataagaaattaacctttgttttatgggttttattgattggtagtgtcggatttggaatctataaaaattttactgccattgacactcatactgtccgtgaaacagaaatcattaaacagcagattgtcgataccaaccaagtagaaagttttgtgaaatcctttgcgaaagactacttttcgtggcaacaatcccaagaagccattgataaacgaaatgaaaaattgacccattatttgacggaagaattgcaggtattaaatgaagaaatgattcgtaaggatattcctactagttctagtgtgaacgatatacaggtgtggcaggtttctcaagtgaatgagaacacctttgaggtactgttttctgttgaacaagttattaccgaagacaaagacaaggaaactatatcgtctagctttcatgtggttgtccatatagatgaatcagataatatggttattatcaaaaatccgacaatgagtaagaaacctcaaaaatcggactaccaacccaaacagctagaaagtgaccatacagtagatacagaaacgatggacgaaatcactagctttttagaaacgttcttccagctctatcctaccgccacagaaaaagaattgacttactatgtaagtaatcatgtgttacctatgattaacaaggaatatgttttcgaggaattggtgaatcctatctttaccagaaaagataaccaagtaatcgtgaatgtcgctgtgaaatatttagatcaagaaacaaaggcaacccaaatctcgcaatttgagttgatattagaaaaacaagataattggaagattgtaaaataacaaatattggtacatgattacagatactttgtaatcatgtactctttttgataaaaaattggagattcctttacaaatatgctcttacgtgctattatttaagtgactatttaaaaggagttaataaatatgcggcaaggtattcttaaataaactgtcaatttgatagcgggaacaaataattagatgtccttttttaggagggcttagttttttgtacccagtttaagaatacctttatcatgtgattctaaagtatccagagaatatctgtatgctttgtatacctatggttatgcataaaaatcccagtgataaaagtatttatcactgggatttttatgcccttttgggtttttgaatggaggaaaatcacatgaaaattattaatattggagttttagctcatgttgatgcaggaaaaactaccttaacagaaagcttattatataacagtggagcgattacagaattaggaagcgtggacaaaggtacaacgaggacggataatacgcttttagaacgtcagagaggaattacaattcagacaggaataacctcttttcagtgggaaaatacgaaggtgaacatcatagacacgccaggacatatggatttcttagcagaagtatatcgttcattatcagttttagatggggcaattctactgatttctgcaaaagatggcgtacaagcacaaactcgtatattatttcatgcacttaggaaaatggggattcccacaatcttttttatcaataagattgaccaaaatggaattgatttatcaacggtttatcaggatattaaagagaaactttctgccgaaattgtaatcaaacagaaggtagaactgtatcctaatatgtgtgtgacgaactttaccgaatctgaacaatgggatacggtaatagagggaaacgatgaccttttagagaaatatatgtccggtaaatcattagaagcattggaactcgaacaagaggaaagcataagatttcagaattgttctctgttccctctttatcatggaagtgcaaaaagtaatatagggattgataaccttatagaagttattactaataaattttattcatcaacacatcgaggtccgtctgaactttgcggaaatgttttcaaaattgaatatacaaaaaaaagacaacgtcttgcatatatacgcctttatagtggagtactacatttacgagattcggttagagtatcagaaaaagaaaaaataaaagttacagaaatgtatacttcaataaatggtgaattatgtaagattgatagagcttattctggagaaattgttattttgcaaaatgagtttttgaagttaaatagtgttcttggagatacaaaactattgccacagagaaaaaagattgaaaatccgcaccctctactacaaacaactgttgaaccgagtaaacctgaacagagagaaatgttgcttgatgcccttttggaaatctcagatagtgatccgcttctacgatattacgtggattctacgacacatgaaattatactttctttcttagggaaagtacaaatggaagtgattagtgcactgttgcaagaaaagtatcatgtggagatagaactaaaagagcctacagtcatttatatggagagaccgttaaaaaatgcagaatataccattcacatcgaagtgccgccaaatcctttctgggcttccattggtttatctgtatcaccgcttccgttgggaagtggaatgcagtatgagagctcggtttctcttggatacttaaatcaatcatttcaaaatgcagttatggaagggatacgctatggttgcgaacaaggattatatggttggaatgtgacggattgtaaaatctgttttaagtacggtttatactatagccctgttagtactccagcagattttcggatgcttactcctattgtactggagcaagcctttagaaaagctggaacagaattgttagagccatatcttagttttaaagtttatgcaccacaggaatatctttcacgggcatataacgatgctcccaaatattgtgcaaatatcgtaaatactcaactgaaaaataatgaggtcattattattggagaaattcctgctcgatgtattcaagattatcgcaatgatttaactttttttacaaatgggcttagtgtttgtttagcagagctaaaaggatatcaggttaccactggcgaacctgtttgccagacccgtcgtctaaatagtcggatagataaagtaagatatatgttcaataaaataacttagtgcgttttatgttgttatataaatatggtttcttattaaataagatgaaatattctttaatatagatttgaattaaagtggaaaggaggagattgttattataaactacaagtggatattgtgtcctatttgtggaaataaaacaagactacgaatacgagtggatactatacttaaaaatttccctttatactgccccaaatgtaagaacgaaactttaattaatgttcaaaaaatgaatataataacaatcaaagagccagacgccaagacgcagagccgataatttgagaaatgaaactctcatcttatcggctctttttgtttatctgaattttactgactagccttcaatatttcttgcttcattgataccttttgctagtgcttccattaaggatagttctttgtctgtaaagctatccatgtatttttctatctgtagccttcgagtgctttttatcaaattatctgtaggtaagaaaaattcatcaatagacacatggagtaatgatacaagatcataaagcacctgtgtacttgggtgttgccctttattttctatatttgttaaataacgtgggtcaatttcaatgattgttcctacttgttcacgggtgagaccacgttttattcgagcctctttaatcgctagaccaacggctctaaaatcgtatttatcttcttttttacgcataataaaccacctctatacattttactgttcctatccaagtggaaacaggtatagaaaaacgtgttatgtagtttgtgagttcttttaagagcgctattatgcttatgaatgtgataaatccaatctcaaatagaaaggtcgctgattttatttacccatacaactatataaaatttagttatgctgctaaaaagtagataaaattggcgactgaatggaggtcacagtcgccatgaaaaagatacgtcactatctaattctcttaattaggttcttatcaaaaaaacttacccacctacactagataaatatgaccatcaatgtggttttacaaatcgtatagacagaacaattgaagcacatgaacagagaaaacaatctgtttatgtgtttttttggctacttcgtgaatatcttttaagatttttcttcacttatgcaacaaatccccctttcgtgtcgggacttagtatgaagggagataaagaagtacatgccactccctttcacgacagaaagggggtgaaaaacatgaaaccatcttcttttcaagaaaccatagaaaatcagtttgactatatctgcaaacaagccattgaagatgaacggaaagattatttcaaacatctaagcagactgtccaaaaaagaagtttcattttctgaaatagataactaccttgtcacctctttttctacggttgatacgtatgtcactgattttcaactattcacattgtatggattaagaatcaatgttgaaagtgatttgttaagcgaagccttacgccaccttccagagaacaagcggaacatcattttacttcattattttatggatatgagtgatgtggaaattgcagaattactaaatgtaaatcgttcaacagtttatcgtcatcgaataagtggactagccatgattaaagaattcatgaaggagtgtaaagaatgaaaacagcctatccaagggttcccttccccctcattgtaaaggcgacagatggcgacgtggaagcaattaatcagattgttaaacattatcgagggtatacctcaaaacgttctttgcgtcgcatgacagacgaatatggcaattctcatatggttattgatgaaaccctacgtggcagaatggaaacaaaactcatcaccaagattttagcgttcgaaattaaataatctcattttttcgtggaagcgtgttgaaccgttccacgcttcccgatttgggaggtttgttattccatcaaagcctactgtatgttcagtatgttttgataggctaacaagccaaacgttctttgacaattgaataaagccaatcgaatacgtttcgataagaaaagagccaacgaactaacacgccatgatctatgaagatagcgagcgattcatgttaaaacttcgtaaacaatctttagcaggattgttgccatgactttcttatcgtgataatgatactcccgtatagccacagtccgagcgttagtagcgtcgcagacaatgggtacggctacatgaaaatcatgcaggggtgaaatgcccgtgagctttgctagagctgttcgattgctgggatattcttctcttgtcaatgtattatcataaaaatatttgatataattataggtgaatattggagttttcctagcctataatgggaaaggagtaataatgataacggtcacaaaaaaagatttagttgagctaggatatggaacttctttttcagcagacatcataaaaaaagcaaaagaattgatgattacaaaagggcatacctactatcaatctcgaaagttagatagagtccctcgtgaagctgttgaagaaattctaggaattcggttttcaaatgaaaacaggtctgagtagtttttgcacagtaaggagtaaaaactatggttaaagacccaataaaaaaagcaaagaatggaacctattattttcgtgcaaatctaggttatgattctaaaggaaaaaaaattcaaaaatatcgtagtggattcactactaaaaaagaagcaagagaagaatattcaaaactactactgatgaaaccagaagaattaagtgagaataaggataaaatgacgtttaatcattatatctttgaaatttttcttccatggtataagacacaggtaaagctcagaacatatgaaaatcgcttaccaactattaagaaacatttctcttattttgataaaatggctgtttccgatattgagcctattgatgtgcaaaattggcaactaaaattatcaaatatataaaaataccgatacctgccatatatgccatatagaaattagatatgaataacagtgttaaagtgcctgttagtagccatatcttacctttattgatcaaatgatcaacacccattaacgcaattggtattaatattatgctatcaagccacattacattaaatgcataaataatattaaatgacatcaaagcatacgctatggacaatcctaagcgataaacatagtctaattttattcttttattgataaacaaataaaatgtaatacctgaaagaacgattttagatatgattagaattgtcataaaaagcataatttgactatccttaaaaaggacaacgagaaaacttagtgggctcattaagtaataacccattattgtaaagaaactgcctcctaatcccaatttaaaactataaaaaagtgttccgttatgtactagttgctgtcttaagtatttgtaaaagatactatactgcgtataactatctgctcgtatccataacttattaccaaacggatatagcccctcgtaggcagacaatcctacaagaatagctaataatattattattaataacattacactcaaaatagattttctatttttactcatgatatatatatatatccccctcgggctttctttaatataacaattaacatgataccccaatattgccattaatagtccactatcttttaataaataaaaaaacttcgcctacacttaaaatttcaaatcccttgtatctcattagggttctacaattttaaacataaacaaagtttttcaacttttatcatttaatattcaacgaattaataaattgataatccacatatcggccttctccactattactattggaataacgactgattaaataaatattcttctgcttcagtttagcatcgacagaaactttaatatcgaagccactctgcgccgcattatcaacagttggatagacagctgcgacatcatttcgagtaatcctattaatgcgaacccgtccaatttctttattatttgctttattcattatgatgataaaattattatttaagccttgaacgttcttagaaatatgccatcccgaaatatggaggatattaccattttggataagttgatcaatacttcctaaattacttgggccttgtggtacgttaacaacattaggaaattgatagtcaacataatcactgttaccattcgtggtacttgtatagcgactaataacgtagaaattcttgccttctaaactcttatccaccgctaattcagcactaaaaccactcataccagaattatacacattaggatatacactatgaacatcatttctcaatgaattattaactttcaagcgcttaatttctttattagtatcgacattcattacaatcagataatgcgtatttttcccttgtgcataatcactcgcatgccaaccattcattgaaattttatttgaattaactttaacgttatccaaactacctaaattttgcttagttggcgcaggaacttttacagtattaccgaaatcaaagtcttttgcactcccttcaccgcttggtaattgtgcataacgcgatataaccctataggtatgtccatacattcctgagtctactgggatgttggcattaataccactcattgctgccgtgttaatagacggataggcatttgctacatcatctctcctaccacgattaattgcaatccttttatgttcttttcctgtattggtatcaattagaattaaataactgtacggtaaattattggcatcattaattgcatgccaaccaagcgcaaggatattattgctatttgcagttaattgatcaaggctaccgacattatccgttacttctcgatcccaacttgttaatccatactgctcaatcaaactgtttaacaaagtatcatagttaggcgctgtagcataaccgtcttgtttcaaaagactcgttacctcacgataattagttttccacaacaaattatgatatcgtgaatttaccgccaaaaagttcccatgatcttcgatactttcattccaactattgtattttctaaattgcgcattaactgtaatccactgaccattaatatattcttgagtgggcattgttacgtactgaccattgtatgttcccttaattccaaataagttattaccatacgttgctaaagtcgattgcccccaaccgctctccaagattgcctgcgcacctgaaacagagggtaatacaccatacttgcgccatgacgaaattgcaccatcatgaatactactaataaaactggaggtatttcgtaataaattcattgaagctctggaggtatttcgtaataaattcattgaagctggcgtacttctttgacttactttaggcgcatcataaaccccaggaccaatttcattattttgctttacagtaacttcttccttgttctttgtttctgctgctgattcactatttttaattacaccggattcagttgaattatcggtagatggcttttgttctttagaactttgactacttgctgatataatactttcattactgctcattaatgcaggggctgtctcttgtttttgttcagccgctgatactcgttgatttgttgttaagccaattaaaccaatcgtactcattaaaatactattcttaacaatttttttcacttcacaagtcgctcctagttagttttttcagacatactaataatacaatacaattacttaaaacactatttcgttttagttacaaataaaaaccgaacatcttatccacacggttaagacgttcggcaatattttttagatgttcaaggcattgtcaaacacgtaatcaaccgtatttccctcacctgaaggattatctgaataacggctaatcacatatattcttttgttaaccaaactgttatcgatattaaacgttaaaccaaatccactgtttttagagccgtataatgttggatagacagcagctacatcatttcttaaagaacgattaattttataacgccgaatttctttgtttgttgtcttatccataataattaaataactatacggtttattaatcgaagcattagcagcatgccatcccgacattattacggtattatttacacgagacaattgatccatacttgcagcactttcaataacttgtttcttaggaactccaatttgattaatgaattgataatccacataatcagcatcagcatttgccgttgctgaataacgactaatgaagtaaatattcttgccttgtaattgactgtcaactgggatatctgcagaaaatccgctcagccccgccttatatagatcgggataagcagcagctacatcatttcttggtgagttggcgatagtcatccgtttaatttctttatgtgtattagcatccattacaattaaagtgtgaacattacggccttgtgcatcatcatttgcttgccaaccgctgatgtgaacattattgaaacttgccgttagggtgtcaatactccctaaattttgtttaacaattgctggtactgttacctgattatcaaacgaatagtctacgtatgctccttcgccatttggtgtacttgagtaacgtgaaattactttatacgtattaccgcgcatatcatttgttactggaatactcaaaccaaacccactttttcctgcattggcaatattcggataaacttgtcgaacatcgtcacgttgcgtacggttaattgcatagcgcttatattcacggcctgtcttagcattaattacaattaaataactgtatggataccgactagaatccactgatgcgtgccaaccggacattgataatgtcttcttatcagcagttaatgaatccatacttgctacactggtttcttgcttaggtactttaataatatttctaaatgtgaaatcaacagtgtcggtattaccgttgggatctgacgagtagcgagacataagaacgtaactcctattatgcatattattatctaatgtcaatgtattgttaaatcctgaatgtaatgaattggtaatgttttcataaatgttatgcacatcttgacgatttacacgatttattttataccgttttacttctttatgtgtcttactatctaataagaataggtagctatatggccgattggctgtttgctgtgctgtatgccaacccaccacatgaatttcattttcagacacattaacactgttaaggctcgctttatttgcaggcatttgatcataataatgttgcactaatgcataaaattgattcatgtcatacccatattttgcaaagtaagcatctggatcagtatggtctgttccaccaagatattgtgtaacattatgatgtgaccagattgtaccaaccccattatgattctgtgccaaagatggcgttaaattatatttgtttaacaagtaagcagtgtaccacgctgagtaactcgttgtcttagcaaaatcttcgaagttacgagccgttaccatttcaaattgggcaaaatatttattaccaactgccccactaccccatgcaccataatctgtatcatgaatgtttaatattgtcctagcatcaataaaggtatgaacaaatgctgattgccacccaccattaatctcatagtctgcttcactccgagcactataattattagggttatcagtataatgaacaaccactccgttaggacgattatcatctgttttataattaaatattgagaatgtatgcaaatcttgcgtaatgtttggatgtaagtagttgtgttgatatatataattattgacacttggatagttgacaaagaaaaaattgaagaagcgtgggttgtgttgatatatataattattgacacttggataacctgctttaggcataatcgcctttttaaccttagatgaatcaataggcatcccaatatcgtcagtcttcgcttttttctcttttataggtgttgcttcttttgtatcttgactatttagttgcgttttcatttcatctggcgttagcacttgtccagcttgaacattgtttgtagcaaacaaaaaggtcgccgagaccattgtaaatccaattaagaacttcgttagttttctattcattttttcccctctagaatccttaattaacttccacgtagaatattaacataaactttaatatttttacagtctgttcagcattattaatcatataaacatttattggctattaatcaaaaaaaacgtcctgaaccttgtcggttcaggacgttttaattatctttccaaataaaactcaaatcgttcgcccacatattgggtgcggacatattcgaaaggttcgccgtttgataagaaggaaacttgtcgtaatttcaagattgggccattacgcttaatgtcgagatattcggcaattcgttctgaggcgagttgggctgagacggtttgttgtgcaccgcccatttcgtagccccctttttcggctaatgctttatagaaggaagacgtgatttcagctttactgaaatcggcaactaagctttgtggcacggttgccacttcaaaacagatgggcacattgtcggcatagcgaatccgttccatgcggagcacctgctcgccatcttttaactggagcttttcagcttcgctaagtgatgggttggcaatgtggaacgaaatggttttactagatggctgcttaccttgggcagtcattagatcggtaaaactagtgacgccggacattttttcttgcaccttttggttagcgacatatgtcccagccccaatccgccgttccaaaatcccttcgtcaactaatgtttgtacggcttgtcgtaacgtcattcgcgacacttcgaaatttaaagcaagctcccgttctgaaggaattcgatctccaatcgaccacttgccggcttcaatatcctttttgagttgattatgaatttgaatataaacaggtgattccatgggacacactcctaaatattaatgttgatagccgttcccaaagctgtaagttgcgactaagttttgttgatgatctaagatgttgaaatcagcatcccgaccttcttctaatttacctttttgtgttaagccaaattcttcggcttggttgacacttgacatcataacggcttcaaacgtttcacaacctgtgaatgtttggatgttcttgaaggcatcgatatatgttaacactgatccggctaaagtgccatcttctaagcgagcttgtttgtctttaacaatgactttttggccgcctaattcgctttcgccttcagcaatccctttagcccgcattgaatcagtcacaaggtcgatgcgttctgcacctttttgttcgtaagctaatttaatcatgtcaggcacgatatggaaaccatcagcgattaattcagcgtacatgttgtcttctaacattgcgtgacctgtaacgccaggttcgcggtgcttgaattcacgttgggcattgtataaatgggtaacgtgcgttgctttactttcaagcatttgttcacgagttgcattactatgaccaactgaaggcacgatgttgtgtgctaaacagtagtcttcgaatgcttttgaaccaggatcttctggtgcataagtaattaaacgcacgcggttacctgataacttattccattcgtccaataaatcaacgtctggatctttgatgaattgttcaggttgagcacccttgaagattggtgcgatgaatgggccttccaaatgaacaccttgaattaatgggttcttttcagccgctgctttaacaccgcgcatagcattagcaatgttttcgtttgattgcgtcatcgttgttgcaaataaggttgtgaccccttcattttgcatcatcttagttgccatttcgtcgatttggtcagcatcgccgtccattgcatcaaaaccataaccaccgtgacagtgaacgtcaataaagccaggaatgattgtcttgcctttaacgtcttgaatttcttcgccagcttgtgccttgtagtcgaacattgggcccactgccaaaattttatcatcgaaacgaatataaccgtcttcgataacgtcgccacctgtatagattaccgcatgttttaatacttttactgccattatccatccacctctatctttaaattacctctagtataaatggtatagaccaaaaaaacaagggattccgactaaactttgaaccgttttcttgttaatttgctatactatatttatccattcatattaagtctagtggtaataagtcaagaagataattgatataaatatcgtgtaattttacaaaattggcaacactaaactaagcctacttaaaattcataaaaattttagtaggtattccaaagatttgcgtgaataactacgttattccttcaacacactctttggtggtgtgtaaagttggtgattgcgtagtagcgcatcaaccaaacgcacaaattttctggcggttaaaacaatagctcggcggtgcttatttatcggagtttcggtatatttctttttataaaaagctgtgtattcaggtaagtgattttttaccgagttggcggcttcaactaagtaataacgtaaataatgattaccttgttttgttagtggtgtgacttctgactgataatttccagattgtttaactttccaggatagaccggcatatttggcgacttttgcttgatcatcaaatcgttcgatttgaccgacttcagctaagatacctgcggcataaaccttaccgattcctggcacactggttaagcattgatattcaggaattatttcaactagtttttcgatacctttatcaatttgtttaatactttgctgtaatgaacgcatttgaactaccaaggtactgagaataatatcaatcgactcattcattaatcgcggcaactgatagctatttttaatggcacgctgaatggttttaaccagtttttcaggatttttaaagttactgcggccaacattttgaatcaattggacgaagtcctctagtggtaaattggctaattcatctaatgagtagttttcagtcattaaatgtacaattgtggcgctaaaaatgccggtagattctgattttaattccttactaagcgtattacatttataagttaagttttctaagaaatgttgtttaaccgttactaattcggtaactagttgatatctagtacgggttaaacgttgaagtgccatatatttttcttctttgataggtgacgttgtaaaacgttgaattcgtaagtagtcagcaattcgcatggcatcattggtatcagttttgtcttcatcgaagacacgagaatattgcttgattttaaatgggttttcaacagtgactaccgttggtagtgcatttaagtctgcatcttcttggaaaaacatagctggatgaaaactatatagtgatgttgattccataccaatcacaatctgttcaaatgatacttctgcgtgatgttttaaaattaaggctttaatttcagaagcaccatttaaatcgttagcaacacttaaacgatttaggattgataagttactatcatcagtcataaaacaagcatcaatcttttcagaactaatatctaaaccaacaaataatttcacaggaaggacctcctttcgagagttatttggaacttgctttgatactgcgggattccccagaaaatctttacacagctacaacctcgcgtaacagaattttgaccaattggacttatgccgccttcaaactactacattgaagataagcctgattgaaaacagctagtgagttgggagagagcgtaaagactcgggtaacggacttactaaagtagagttaactacaggagtttttagcaaattcccgatagatccattccatggtcctattatattctgaagaatcccgcagtatcaaagtaataattaaattttattgtaagccaacggcttataaatatatcttacgaggagtttaatgatgttaaaaatcggtgttattggactaggaaacattgcacaaaaagcatatttacctgtaatggcgcagatgcaagaccgggtcgattgggtcttatgtacgcgccaaccggctaaattagcgcagcttcaagcgcaatatcatttagaaagtggctgcctatcatttgacacattactcgaacaaccactcgacgcagttttcattcacaccccaactgcaacccactatcaatatgttaaacaagccctgctccatggtttacacgtttttgtcgataaacccttaagtgaaaatccactggaagtcgccgaattatacaaactcgcggctagcaaagaacggctcttaacggtcggcttcaaccgccgttttgccccatttttgcaaaaattaaatcacttacccgataaacaactgattaacatcactaaaacacgcgtggcaacgagccaaccaacgccctttgccatttatgacctgatgattcataccattgatacggcgcttttcttggctgattcactaggtactaattacaaaatccgtccatactgtcagcaggatgcaaacggcaatttacaactcgcacaattaaccattgaaacaccgcgccaattaatcagcgcgactttaaatatgcaaagtggtaccaatcaagaaattgcaagtctccagacaccacacgggttattcactgtcgataatctaacgcgctacacaacacaagcggcagaagacagtcgcattcaagttgcagctgactggatgcctacgcttgaaacgcggggctttgcgccaatgattgatgcgtttattactgcccttgaaactaacggcgcaaatcctgtcccaccagaatgtagcttactcacccaccaattctgtcatgagatggtccattttacaaaataatataaaaaagcgtaacccaatacagtatttgtatcaggttacgctttttacatgcttgagagcactctatttttggctttctaaatccttggcaattgttgcgtcgatgcctttgacgacggcggtcattaagccggcttcttccattgctaacaagccagcaacggttgtgccacctggtgatgaaacttgatccactaagtcccaaggtgaatcatcactcataagcacgttttgggcactccctaaaacagcttgggctgcaatttcagttgcggctttctttgttaaaccgtgtttaacgccggcccgcgccattgaatcaatgaataggtaaacaaatgctggtgaactaccggcaagcgcactgaaagttgtgaaatctttttcgccgatttcaaccacgccaccgagttgtgcaaggacatccttcacccgacccaattgctctgcattgacttgttcgttaccaacaacagctgttatccctgcgcgattggccacgttaacatttggcatgatgcgtagaattggtaaatctgcagcagattgttctgctaatttatcaagtgataaacctgctgccattgaaaccatcaatggttgatgtgctttaaaggctgcatttgtttctgctaaaacctgtggcacaatatatggttttaccgctaaaaaaacgatgtcggcttgttcaaccactgaattgttatccgcaacagctgtaatccgttgttcagctacaaaatccgcatagttcgccggatgtccgccatgcactaaaatatccgttgttgcgacttgattagctttcactaagcctttaatcattgcttgtgccatgttaccgacaccaataaatccaattttcattctgccacccctttttttatttatccaaggataccgaacgagcggaggaaagtcaatccaggacacaaaaaaagacatcttagcaagatgtctttaaagtattgggctagctggattcgaaccagcgcatgacaggatcaaaacctgttgccttaccgcttggccatagcccaatcaagtggaggagagtggattcgaaccaccgaacccgaaggagcggatttacagtccgccgcgtttagccacttcgctactcctccatacgtttcatctcatcgattcaactatattagtttacaaaattctgacagaaaaatcaaccccaaaatgcaaaaaaaatcttgattattgcataaataatcaagattttttctaatatttagttaacgccttccattaacttatgaattggtttaacgaagaagattaagacgatcccgaagatggcactcacaatcccaatccctaagaaatatctaatttctgtttgtggtgaatataaacgcacaagctgtgcattaattgcttggcccgcagcatctgctaagaaccacatactcatcatttgtgattggaatgcctttggcgctaattttgttgtaattgacaacccaattggtgaaattaacatttcagcaatttcaacgatgaaccatgaaccgattaaccagaatgggctaactcggccagcggtaccgtgtaataatccaggaagtgccataaacatgtatgataaaccagcgaagattaaaccaacagcaaacttaccaggtgcagatggttgtttcttccaagcactccataaccatacaaagaatggcgttagaagcataataaatagtggattcaatgattggaaatttgatgcagctaagctatgcccaccaatgtttagaattgtccgatcttctgcaaataaagctagaacaacggagccagattcttcaattccccagaagatagcagctgcaataaagagtggaatataagctataacgcgtgaacgttccttcttagtcactttcttgctgcccaacatccgtgagaagtacacaattggtaatgcaatcgcaatgattgaaatcatcaagacgatgttatcaatgtttaagttgcctgtaaattgcatacctaatactacggcaacgacgaccacgacaccaatcacaattttacgaataacgcttgataattcttctggcgcaattggatcattaggttttgaattttctttactgaattgagaacgaccgcggtagtattggattaaaccaaagaacatcccgacagcggctaatgagaagcctaagtgaaaatcaattttttgaccgacagccccaacaagaattggagcgacaaatgagcccaagttaatcccgaagacgaacatactgaaaccagcatcacggcgacgatcattttcactatacaaactaccaaccatttcagaaacgtttggttttaataacccagtccctgcaacaatcaaagcaattgaaataaataaagctgtcgcacccatcggcattgctaaggcaatatggcctaacataatcaagacaccaccgatgaagacggttttgaagctcccccagatccgatcacttaaccaaccaccaacaacgctggctaggtaaaccatcgaaccatagattgccatcacagacatcgcagtcgtcttgtcaaagccaagaccacccttatctaaagcaaaatacatatagaataatagaattgcacgcatcccgtagtagctaaaccgttcccacatttcagtgaagaacagtgttgatagcccatgcggttgcccaaagaatgttttttcttgtttctcttccattgtaataccccactttaaaactttattattacggaaactaagaatttgatagttattaaattgaatcgactcatctatacaagaagtctcttatcattcgcttagaatctataaaggctattataatcttattttaatcttaaatcaattcttttttcaacattaactgcattgtttgcactgattttttcattaaaataagttattttatgattcaaaatgactaatgcttattcttaaatgagaaaatgctcatgatacctaacatgttcttagaaaactggtttgttgcctttaaacagtagtacaatgaactaatagaaagcgagctgattccgatgaacccttttacactaacatctcttattccattacgacctgatcgttggctaacttactacgaagcaatgtatcaaaatgaacacggcgatttaatgccttatcattttgtcagtcgtgactctaacttaaccatcgagactttaaaacgaccagctaatgcctcagcggttgcaatgttctgctacaatcaaaatcactcacaggtcttactgactaaacaatttagacagccccttaatgattttgtctatggtaatcccgccggtttagttgaaccaactgagtcgattaaacaagccatttcccgtgagttaatggcggaaacaggttactctcttattgaggttgaacattgctttgcgccaagttattcctcaccaggccttactgatggcgccgttagtctagcaatctgtactcttgatcaagctaaacaaacagaccgtacacttgaagtggatgaagccttaagtaccctgtgggttaatcgtgctgaagcacagacgatcttagccaatgaaaaaatgactggacgcactcagattctattatggcaatgggcaaatgaacaataagtaatagccagttacgattttcgtaactggctattttagtggttgcttttcaatcaaattgaatattaaaaagcattatactaataaaacgtcagtacaatgctgattatcccgattagcacttggtagaaacatgctattgatgccggctgcaggagtcgaacctgtgaccctcggtttacgataccgatgctctaccaactgagctaagccggcattattgatgacccgtacgggatttgaacccatgataccgccgtgaaagggcggtgtcttaaccacttgaccaacgggccgaaataaaaaacgattgaaaattctcaaccgttcaatgactccggttgtcaggctcgaactgacgacatcatgattaacagtcatgcgctctaccaactgagctaaaccggaataaaaaaattattattagtaaaaatatgactcctaacaagcaaccgcagccgatgttgaaaaagaagctcaaaacgctccacacaaaaaggacgcataatataaacaggaatgtcagcatcattgccacctctttatttgcaaaccacgctcacttttaccggcttagatcaactttttcattgatcagccacacaacaatgtcgccaattaaaaccacaacaaattcaccaatgccgactgtcaaatatgtcatccaaaacaaaacttcactgaccagatgtaattctagtgcgactgcctatgacattccggccccattgatgactataaattagcaatcaaacacccctcatgtaacgtttgttgaaaaccaccatagtattgagcagttctgacaaacgaaattgaatcggtctataactcaatggtgtaaaagcaaacgttaaaactacataaagtgcagcaatcaaaactgttttagtgatctcagcaactttattattaagacgtgccctttttaagaatctcctagtttttaggtgggatggtcacgaaccaccatgtaacaagtaattattccattaatactgtactttcaagtatagaaaaaagacgaccgtttatcaacctgaaaagcatgttataattttattattagacattttaacaaccgagtaactagtcgctaaaaatcgtggatcaactaactgtctagcctaacaaatatttgacacgacccacgaaatttatacaatgaatggatattactaatgaaaatcgctattttaactgacagcgctgcgatgatcagcagtaaagtcggatcacaaccgaatattagggtcttacagatcccactttcattggatggagaagcttattatcccaatgaattaccagaagttgctggaatagaaacgctaagggaagccacgcttaacactgtaacagaagagcagatccctctaaccacaatttctgcagtaaccgatgaacttcaacaagctggttatactgacgtactttgtatacatattgccagttcgatcagtggcttaggctcaaatctctctactttcgccaaaagctgtcaacagccgcttaagatccatctctttgattctcatactcttggtcctgcagaaggagcgttggttgaacgagcacttactatgattactcacggactaaaaattgctgacattttagcagaactaaccaagtatcgccaaaagcaacatacactggtcataatggaaaatctcaaaaacttgcgtcggatcggttctatttcaaataatgcacatctcttcagtaataatatgctgcattataaaaccttgctacatttttccgaaaatggtgaacttgaagtcttgatgaaaagttcacgcacgaaaaaaattgcaacggcgctattgaataagtttcgcagctctgcagcaaaaccggaactagcaatcgtggcagacaatacaatggtcttggaaaaatatgtttcttgcctgaaagaaattatgccgcaacttcaactagtaactgatctatattcaccttcgatattttccttcatcggtccacaagcactgatcattagttggcaaaataattaactacatgcaaaaagatcgtccttcaatttaaagaagaacgatcttttttgtttgcagttctcttatattaactttttgctatttaataacggactcgcaattggccagcttctcagctttctgcttagttatctaaatcaaattgacccgtcagtttttgcaactgagcagcagtttcttccaaggtcgaaacatgttgggtaaactcatccatcgtagcttgcacttcttcagagttagccgaaacttcctctattcctgctgcgttttcttgtgttgaagctgagatgctttcaagtttatctaagatcatcttttgagtttcactgatctcttttgtaccctcatggatcttttgaacatttgcacccatagcttcattatgcttataaacgttcattgtcgacttgatggcttctgtgatcaaaccagtctgtttttcactgctttccagtgagtctgttgttgtcttgaccaaaccagttgattgctgtctgatctgttcaatgatcgactcaatttctttagtcgaatcattactttgttcagctaacttccggatctccgctgcaacaactgagaatccttttcctgcttcgcctgcactagccgcttcgatcgatgcattcaaagcaagcaagttcgtctgtcttgcaatatcattgataacgttaatgatcttagtaatgttttgtacatcactatccatttcctgaacactactcatcaaagcttgcattccgttgatctcatttgaccagttaccattgaccttgtccatgacatccaggttattttgtccaacttttgaagcttctttggatgaattagcaagctcttccatattcgcattgacattatcaatatgtgcagtgattttttgaacgttatccacgctttcagtagtttcttttgcttgtgatcctgtcacttcagcaatttcagtgatcgtctgtgcgatttcttcagaagcagttgttgtttgtttcgaaaggtcaagtaatgatgcagctttttcagaaacattcttggcttcttgctgtgtttgtccgatcagaacagtgacagaagcgatcatattattgtaactagccgctaatctgttaaactcatgtccattcacatcagctctggtcatcttttgagctagacgttctattggtaccttagaatactcgattttttcacccactgcaggcacgtaactcatcttaccttggccagcatctataaagaacttctcaagtattaataaagcacgtttgagcaaacctgcactatagtaagatattatcacggctaaaatgatgatcgccaacattgagattgtcaaggttatcaacatatgatgtgtgcctgcgctcaaatcactattgttcatttgggcgatggtccaattgtcagttgtgccattgcccttgtcaaaggtaaccttattgatctgcgaacctccaggaactttgatcgtccccttctttttcgctgaagcagccactgctttataaacggctgtcttgttgatcattttacctgctttaaaagtattattgcttttaccagtgttctttttgatcaaaaccctgccggctttagttaaaacggcggcttgaccattgtttccgatttccatcgattcaacagatttttgtactgatgaatatgaaacagtaactgctaaaacatgggctttcccctgcttatctacgattttctgggaaacacttgcactatacgaatgattagccggatcttcataaggaatcgaccaatatgcatgtcctgtgggtgctttttgataccaatcttgatctaaaatattcatatctttaggcatcgcaaaattcgaataagcatatgtaccatcagtgttgacatacatcaagttggtgatcgttccctgggcgtcgccattggcaattttcaaagttctgttagcatcttttaagttgacattattggtcaactctggtcttttttccaaactagcaatttgtccagtaacatcttgccgcatgtcaacttgttgccgttgcaaaacatttacagccgtcacttttaaacggtcatttttctcgatcaattgctgacgtgtattcccgtatgagatcaaattcattataattgccggtaccaatgctatcaataagagtgacgataaaaaatacttctgaatactctttttagcaacttttttcttacttgccattttctttccccatctttccctaactatctaatttgatcccctaaggatctcatgactatcgttcacaaaagcactgaagcaaacaacccctaaataatatgtttgccagtatttgcttttgcttgcgctgaagtcatcaaattaacgagcaattactgctcttttacccctttagccccactaaaacaaaacataactttaacgcagataatctaatatcgaagtttgcatgaccttagtccccatagccaaggtcgaacgatatgcaatcatttgattttgatattccatatacttctctgtaacatcaacatcttgtttattagataaagtttccgctaaagtatttttctcagatttatttcgagctgatgctgaacttaaacgattttcgatcgaaccgatcttagatctatagtcagtaaagttttcagtaaatttatcgatccctgacaaatattcactggataactttctatctggatcccccgatttcaaagtatcgatcaaaccgctaaagaattcggtcagttcagacttgctatctttatcaatgccagacgaaccatcggcatgcatcaaacgtgaaccatcagtagctaaatctaagctgacaccatctgagatctcgcgctgtaaattatccacgttgcctctgtattctaaactgacagctgccccttcagcatctttaataacagcaaatggtggctcttgtgtctttgtccccccaaagatatacctgccatcatagttggtattcaaggcatcaactatccctgagatcgactgtgagatttctttacggttcgcattgtaaacggcaggtgtagctgttccgctattggccgacgactcgatcaaatttctaatgttaagcatcaaggtcgaaacattatctaaagctgagtcttgcgtttgcgaccagagcgtggaatcagaaattgtttggccatacgttttgttttgtgaaattgaaacattcagatctaagatctttgcgactaacaaaggattatcagaagccttattgacctctttcaaactagacagttgattcattgtcttttgaaccttgttagtactgatctgtaaattcttcaagaaatcagaatattccattttactggaaaccctcattgattaaacccccgttctattgatcaaagtatccaacatttctgaaacgacatttaacaatttggcattagcttgaaaaccttgttgaaatctgatcacatctgacatttcttcgttcaaattaacaccagaagctgcttgatctttgtattccaattgattcaacgctgataattgagcagatgccatattgtctgctttttgtttagatatcccattttttgtaacaatactgttgtaagcacctgggatcgttaaaccctctttagaattattgaaggtcaaagtatctttattataatttttcagcaaattcgctgtatcgaccggataaccaagcttactctttaaagctctagccatcgctaaagcacgtccattatctccttcggccggatcatcaccagtaccgactttcattttgcctggatctgcgactaaatcatcgttgatcttaatacttaaagccggatcactgggatcagtgatttcaaaaaagccgctatctggagtttgcccgtcagaataaacgatattttcaatttctacaacgcctttagcaaaatcatttaattcagctcgatggctttccacttcagccaatgattcttgcaaaccgccgatcgaacctgacttaactgctaacttgctatacttacctgaaccgttcgctgtttcaaaaacgacttctccgaccgtgaagtctccatcgatcgtttgctttggttgtgtttcatcaccatttggcaaaatctgagctttgccgtcagagttactgacaacaacatttaacttagtctgtactcctttttcattgtcaaccactgcatggtcaccgatactaagtgaagcacggccatatttgtcaaacgaaactgttaaattactttcagcagacatatcctttaataaactatcgcgctgatctaacaaatcattgggctgttcatcacttaaatgactgtcatacaactgttgattcaaattagcgagttgttccgccttttcattaaaatctagaacagttttcgccaaagaagaacgtgtatcagtagaaacttgtgaaacttgccgtgcagtttgctggatataagaagctaaagcaacacccatttgaacactattagttttagccgtatccaactcgggattgtcggctaacttttgtaagctgtcagcaaaattattcaattgtgtaatgagtccatcgtctgacggctcatgtaatgcattttctaataaagccaaaacatctgacttttggacgttaaaattgtaatctgaattagaatctcgaacctgtgaacgtacaaagtcatcaacaatccgtgagataccatcagcttgaacaccgctaccgatcaaaccgactcctgtttttgcataagggatcttcgttgataaatcaacacgttggcgcgagtaaccttcggtattagtattagcaatattatgactgctagtctgcaagccgatttggttagcatctaacccactgcgagcagtattcaaagtaccaaataaacctgacatgaaagtcctcctaaagaataacaaggtgaagtgaaccgcataaaagttgagcactatcggactttgacaataagtcgtggtttgcgacttgttggcgaagttggataggcacagacttttggttcacgcaacctgactaagaataacaaggtgaagaaatgcggttagaagccgagcattaacggactttaacaataagtcgtgcatttagcgactttttgttgaagttagttaagcacaagcttttgcatttcgtaacctgactaataacaaggtgaagtgaaccgcataaaagttgagcactatcggactttgacaataagtcgtggtttacgacttgttggcgaagttggataggcacagacttttggttcacgcaccccttctacaacctaaaatgactgatctacgattgccgcaggaatatcttctcgcttaggttgactttgagtcctatgctgatcaacataagtattttcctgtttttccaagctgtgttggatcgtatccatcatttttttctgataagccaaggcttgttgcgtcaacaataaattagtttcttgcaactcttggatttcttgaatcagcatctttgttttgtcgccaatttcaccagtatacttctcaaaaatcggtaagaaatcttccttttgcggaacaatttcatttagcgattctccgtcatcaagaactaaaaacttttgttcacgtttcagtattttgataaataatttaagcttagcctgaaatgccttttcattcatctttatttccttcttgtttcatttcctggaacatctgatcagcaatcttttctggtgagaccttatatgttccgtttgccaactgctgtttgattttgtcgaccttagccgcatccacatcatcgtctatatcacgatttttagcgttgtttactaatctttgagcagtatctgataatttaacattaaactgttgtggtgcaccctttttcgttgttttcgaggcttgattgtgatagtagttttggatcatttgtgaattgattgaagaaatatctcgattaattttcatgtgaatgcctcctttttcctttttgactctacaaatacagttatcggccaaaataaaaaaagttaaacctaaaagttcaactttttttaacttaatttattttgtttgccaattcaccgattgtaacgttctccaatgaaaagggagtagaacgactagaaaaactatcagcaatgaaatcagcacaaaatgatagaccaagtccttatcgttggctttgattcgctttcctctgtcatgaagcaatggcataaaaatcctcctttccatctatcaaaataattgtgtattgtagatacgagcctgtttatcaaaagttggttgagaaatggcttcatatttccgataagcgattcgcttttcaaagcgtaaatctttttctttcggataataatgacgtcgatagagcgtgtgtcctaacagttttttcgcttcttttgtcaacggatagagatagcgaaacatgcgtccattgattttctcaatccctttgtattcgcaaaatgcctgggaaagccaatgctttttctctacctgttcaaaacgagcattttcctctaataaaaggcgagcacttcgagggtgtatcttttcccatgactgtttatcacgatagacacttgtcttgaaatacccgcagtaaaagaagttggacgcttgatagacatagccacattttccctcaattccatctgccaatgtatataaaaaatgacagtccgtatgttctttcaaccacttaattagagctgaaagagcttgactgccaaaataattggtttgattcatttctggaagaaaacacatctttccaatttctaaataatctgtggtttgaagggaactgtcgggaaagagtttgcgtatggtttgtaggggttgcgtaccccagcctaattccacaacgcctaataatttttcttctgaaaaaatccctagaaagtatttacacaatctagggagtatctttgaataatggtattgccgaataaaagaaatggcttcatctttcggaatttctttcaaaatcaatggtgtgtttgtcataagcaacacctatttttcactttcggacgcttcttttttatatttctgatgaggttttgtctgtccttttaatacaagatcgtctgctttcacgtaccaatcaacgtctgcccctcgaaaagtagccgtcgctacggtatctgccacaggattgattaattccacttctgcgttgtagtcaaattctttcaaaggaacagaagcggggatactgacttgtatcatgcgtccttgtccttttgattttaagtcataggtacgttctttaatttcttcggaaaccgaaccatcttcattttgaatacgaacctcacgacgtaaagcggaaaatttcaatgtgccaaatgtctggtctttttcaatcacaataccttctgctaatctcatattttttcacctttcctttcttaagctttcaccatatcgtctgcgtgcataatgtaattggtaaatcctctattgccaattttataaccttctgcggtaatacgtgggttgatgagtctgactttttcgtcggattcaaaatgtttctcgccagcttcggagggaagaatgacaacaatatcatctgctcgttgaatcgttgagtataaattgtagctacgagagagaatagttggtctgccattgactcgacgttgttcaatattcccttcaccagcatattctaattgaccaaatgttttttccatattgggaatgacatattttaattccataagtgtatcgttcctttctcacataaaatatttttggcttactttattcatttaaaaatttgttagtatcacaacctttcaaagcataaaaaatagacgctcattatgaacgtctatcatttaaatgaatattggatttgagtcaatatcttggacatattttagtagagactgctaagacattttctctgtttctaaatcttcaaactcctgtggagttaagtaatgaatcgaactatggattcgattacgattataaaatccttcaatgtagctaaataaagatcgattcgcttcttcgaagtctgagtaagtcgtcgtgtatacttcttcttttttcaatgatgcatggaaggactcaattcctgcattatcatatggtgttcctttgcgactataggaatgccttattttattgttttcaagccaattttccacttcgattgctgtatattgactacctaaatcagtgtgtagaatcattccttctgggatgtggtaccgttgctttgcttgattgaatgtttgtaacacacaatcgacagtcattcgtttagaaaatgtatagctaataatctttttcgtgtgtaaatccataatcgaagataagtaacaccaaccatttttcttagttggaatgtaggtgatatcagctacccatttttcacagatagttttagtagaaaagtcctgatttaagatgttctcttttaaaacaaccggctgaacaggccgttgaggtctgtatttcttaaccacaattgaccttagatttaattgtttcatcagtttttgtacatgcttaagagatactgaaattccttcttttagcaacacttgatggatttttgttgcaccatatctctgtttatgatcaaaaaagatcgttgaaatcttctttttcaattggttatttctgacttctgtagctgttaacgatttatttttataaaaatagtagacgcttctaggaatttctaataaccgacacaacaaagaaacagtgtactccttacaccatttttcaatgaatcgaacaagtgactttaggtctttcgagagaatatggctgcggctttttttaatatttcaagttcctctttcaaacgagcattttcttttctcaaatcagccgcttcttttccggtcagtcctgtggactgatttggtaaatataaatttttccatttgtaaatcgttgcttcagataagccatattctttcgccaatcctcgaacagaacgtccagtttgattcagctcaacaatcatctgtttgaaattttcttcgtatcgggtcataaaatccatcctctcgtagataagtttaatttatttctgtctctacgaaaagttgtctaagatttgatactaacaccatattgagtttagaattccatttcgaatttaatcaggtctgcttaggtgcaaatactgcacttttattgcactttttatttttttaaatataatttattcgattttatacgtttccaaaatccttgatattacagcattttcgcttatatgccatacccttaaaacagagtgggaataaaatcctaatcaaaacaccgcaagtcgtttcgacgacttacggtgtttttttttgtgcaatcaatttaggcttttaacggtacttctttgaaatcagacgcaatataaggtaccgtctaatcaatgaaagtagggatgattgatgacaaatgggcaacaattagcgactagtgaaaaaattaaacaagggattgtctttgcggtggcgaagttaattcaaattctccctttaattggcttaaccatgattcatagcgggcagtcagtggcgtcttatatgccgtatatcttattctataccgcgttgaaaactggcttattattcgtgaatagtctaggccacgtgcagaattcatttaaaataactagtatcagtatgctgctagctgctggtgccttattgttattggccatttcgccgtggttgtatctaaccgatatggcggcttttatcttgggggccagcgccagtgtgatcatgccaacctatgagggcgtttattatcacgagcgagtggtttggaaatggcaccttatgggcactgaaattaaaacgttattggcttttagcctaataacggttggtctgttgaccatcgctagtcatttttcatatcggttcatctttattgttatcatgctatttgtattgattggtttcattggcatgcaacgcttcgaaccgtttgtgaagcaacttgatgaatcggtgttcgtcgaacaaaccaaatcgcttaataacttggaactatttgtctgggcaaccgcgatggcgtttgcgctaagatatctgcgcctttttgaagctaaatttgtctggttattaatcacagtcgctgtcattgggttagtcgcgctaatcttgcgggtgatcatcacgcgcggcactaaaacgaagatgccgggttggcttttggttgcggctttaattaacggggcgtttgaaacattcttaatgctctatatttttgtcgcaattcaaaatcagagtttgatgataggcgcctacgtgacttacggtgcagggatgattttagcccaagttattagaaagagcgtgcaagggcgcttttcgaagttatcagacttaaaagtccaattactaggatttgttgctggtgcgtggttgatgattacgccacatctaattttattaggcatcttattgattagtttctttggcagtgccaacagcattcttttaaatcatcgcgcttattacaccggcgtcacgacgccggcccaaaccttaattattaaatatcggaatacgtatctcggtagtatcctaatgcaatttatcttgatcaccggcttgatgggcctagccgtaatgcggcaacaagacataacggccgtgattgcccaaatcagtggcagcgtcgcaatgtctgacacaaccagtcagttgattcacttggccggcctgattagcgttggcttgctaacggtaattgccggattggctggcagatacttgccggcggtggatgaaaatccgctgatttaaaagtaaaaaaataacggtccctaaatggggccgttatttttgtggtttttgaggattatgttattatttatatggatcttttttggggatgaaaagtgtaaaatgagtagagaggtgccttctagtggttcaatagttaattaaacgaatatgaatgatctaaaagtatgtccggattctaaaggactgcttaaaaatcaacattcttggttatgaggattgagagatatgttaaagagtaagtaactataaaattcattgtaattatgaactatttaaaagatactacacaatgtagttttggtaaaataaaaaatatagattaggaaattgtaggctttaacatagagtgaggtcattttttaagtggtagattgtaaaattaatccgaacgctgttcggacaaaaaagatcagcttcctttaaaatggtgtttaccacaaacccatcttttaggagctgatcttttgtctagtataacctattccgaacgaattaaaatcgaaaccttacgaattaaaatcgaaaccttttgtgaactagggctgtccaatatccaaatgggcgttcggattaattttacaatctaccataagcctaccgattttttaatattattttattcatcaatttccggcgccgacccaagctctgcctgaatcatccagattttcttctcaattgcggttttgagaccaatgaaaatatcttgggtactgaagtctttttcaacatcggatacttcaatgccgtgttggtaaaggtcttccaagtaacgatagccatcaactaagtgtgcgaggcgttctggggttgttttatcccattcaccaggccagtcttgaatcttagtgttttcggccatttcttttaaggtcgagtaaggactgccatcaagcgcaatcagccgttcagaaatgacatcgagttggctgtcaatttcttccatgaactcatccatcaaggggtgcaacttcaaaaagttgggtccacgcatgtaccaatgcgtctgatggataatcattgacatctggctcaaatcggcaacgagttgatttaatactgctttggttttcgtatatttcattagattgatctcctttcgatatggttattataacatagtggtagcttaatctgaaacgttatacactggcaaattaagttatttatagcccgtagaattaagtcgttttgaaaagatggagacgttacaatctaccaattaaataaatctacaattgaattttatttaccttatgaagatgttcaaaacgcgttaaaggaaagtgcgcaaaacccctttatacgtacaaaggatgaatgggtagtgggtaacaatgagtgtaaattaaataaggcacaaaaaaggatgcttaaggataaagaaatatataatcatttcaatttagaaaatattcccagttccatcaaaacggagctaaacaagatagtgcatgacatcgatgactaatactttaacaccaaacagaaaggggctatgaatatatagggtctataactatcaaatagtccatttttttagtataagagcagtaaaaccagacgtggaaaccacgtggtcttttagttgattcagtaaaagaagccgaagccaaagtgaagacgttggtttcggcttctttggcttttaattgcgggaacgcacacaaagagccaaaaaagattactgacagccatcttctgatggctgccagtaatcttttttaagttcttgttcaaaaggtttgataaaatcaaagctagaaactagctccggtcatgcttgttgcgatcattatcgcgtaagtcttctacgtgggcatcaccactcgtatcgatatctagttcttcgcggccgacgttttcacttacttgtttcatatcttcgtgttcttgtttacgaatgtcaacttcttctcgaacgaccgggcgtttgttgacatcgatctgttcttctttgattgggatcgtgatcgtgtcgtcttctagcgtatcattgacatcggtagttgcagccgcaccatctccgggctttctttcgatcacgatttcttctcgtttaaccggtacgtcgactgttttcgtctcattgacaacatttttatggatatcgactttacccgtcgtcacatcatgcttattgatatccaattgttcttctttaagctggatactatcagtatcagtatctagatcagttgcacgtgcagcatctgatgcatgtaaattatttgtgctagtgtcaccagctgcatgtctgcctgtaacattttcagttgcttgtgttgggtcgtttttataattattgacggtgataataatttttccagctgagatatcatctctatattggtaaagcgggtcgttgtttgcatggtcagcttcttcatttaaacttgaatcgtattcgtacgtatcagcagaaaatgcatctttgattttttcccatagtgagcgatcttcgtgagtcgtttcgacgccatttacgccggttttaacatcgattcctgacagtccagcaaaaccaaaatttgtagttgcatctttgttggtgtaaataatgatatcatcacggctatagccttctctttgcagttgttcgatcacggataaagcttcttctctcgtactgtaacttccaataactgttaaatttctttccaacatataaatccctcccatttcaactatttttttaaatacgcttataattgcagtataacgaattcagcaaaaactttaaaagggtagattgcacaacggcttttttatgatgcctatttagcccgtgctgcacggacataatgaataatgagcgtcagtagaataacgccaaacacaattccagcaaacactaggttaggaatttcatagtcaatggctggaatcgacaagaataatttaatcgcgatgaagagaattaagatgtaagccatcggatttaattccggaattttcttcatcaattgggcgatgagttgggcaatcccccgcatgcagataatcccaatcattcccccaattaaaacaatcaccggattactagaaatcgctaaagacgctaatacggaatcaattgaaaaaacaatatccatcaattcaatcgaagcaactgtgcgccagaaccgatgcggactactgattttagaacccgcctccggtgttttagcctgcttcggatgcccactctttctgaaataagcaatgactaagtaaattaaatacaatgaaccggcaactttaatttcccacaaatgaattaaataggtgccgacaccaataataatgaagcggaaaacataagcgccccataagccatacaccaatgacttttcttgctcaatttttgtaggtaatgtttgtgtctgtgccgctaatacaacagcattgtctactgagagtaagcattccataatcactaacgttaaaattaaaagccaatcttcggacgacgtaatgacagtttgccaattactcagttcaaagaatggttgatacaattgtacaatccaattcatctaaggttcctctatctctaatttctgttatttaattcctgtgactatcttaacgatttttcatgaaaataacaaatttattggttaattatgtaactagcacagcatttttattttataggctctggaaatacggtatactttttgtagcaataattaataatattaatggaggtcgttttcatgattaaagaatttaaagaatttattatgcgtggtaatgtgctagatatggctgtcggggttattttgggggctgctttaaaaagcatcgtggactcattaacaaagaacttaatcaatccaatcatttcattattcgttggacaagttgatctatccggtattgcgcttaccattccaggcaccaaggctgttttcaaaatcgggaacttcctaaacgatgtgattaacttcttaatcatcgcatttgttgtcttcttaatcgtcaaaggattcaacaagcttcgtgacatgggcaagaagaccgaagaagaagaagcacaagtagtcgaaacgaaagaagaagtttacttaaaagaaattcgcgatttattagctaacaaagaaaaataaagtcacaaaaaaacgcctgaacaaattgttcaggcgtttttaattgttagcttattgaaatgtgcttccccaaagctaacccattcgagttagcacgcttatcttttaaatctgttttcaaataatggactgactggtttgttttcatggattcgtttgatggcgtccccaataagtggcccgacagaaacttgtaccattttatcgattaatttttcttttggaagattaattgaatctgtaacaatcatttgcttaatcactgaatcttcgattcgttgaatggctgggccagacaatactggatgtgtacaacatgcgaatacttctgttgcaccagcatctttcaatgcttgcgcagctaacgtaattgtgccggcagtatcaatcatatcatcaatgatgattgcgcgtttaccgttaacattcccgataatattcatcacttcagaaacattcggtcttgggcgacgtttgtcgataattgcgattggtgtctttaagaaatcagctaatttacgagcacgtgtaaccccaccgtgatcgggtgaaacaacaacagcattttcagccaagtcattgctcaagaaataatcagccaataaaggagcacccatcaagtgatccactggaatatcgaagaacccttggatttgtacggcatgtaagtctaatgctaaaattcggttagcccctgccatcgttaacatattagccactaatttagcggtaatcggttcacgtgagcgagccttacgatcttgacgtgcgtaaccgtaataaggtaacacaacattgattgttttagcagatgcacgacgcaatgcatcaatcataatcatgatttccatcaagttatcattaactggtgcagatgttgattgaataatgaaaatttcgtcgccacgaatactttcttcaatattaatctggatttcaccatcactaaaacgtttaacagaagattttcctaaaggaaccccaacttcagccgcgattttctcagctaagggcttattagagttcaaagcaaagattttcaacttagggtcgaaatattgttcagacatgtcagcctccaaaaaatttatgttagtacctatttaaagtttaggcattttcaccccggaaatcaagattaaaacttaaaaagttcacaaatgttgtaaagtaagcgctgttcattagaaacgtgagagaaaaagaaaaagttaatagcgattaccatcgaacctcccgtttagtatcccattaaatccccaaaaatgcttgtttattttggattatggattaaattgtcatttagtgcaagacaaggtacactcattgaaaaaggcggttactatgacccgccttaaatacactatttttaataatctctatcttttaattctggtaattattattacttccgatcgcttatttcacctcagcatgccctattttattcttggtcttattctattcgttgccgttttgatttatcagtatcattttttctaccccagtcacccgaactacaatcctaaaaattatcgcattacaaaaatgggctgggcaaccaccgctgttgggagtcttatcatacttcttctaatcttattttcaagtggttcaatttggatttggcccgcttttctaatcgccttcttaatacgcgattatttctcaactttaaaataactacaagtatcaaaaaaatcgtccgtaatctcaaaaataagattacggacgatttttattttaagatgtgctttacaacactaagctaatcgtcacaaacacactttaatccaaaacgtgcttcttgtcaccgtaatttccgcttaatctaacatcgtattaatgctcaattactaactgccacagccagcactctattgccattcttcgtcatttgctactggtagttttgcccagtagttttctttgtttgtttgacgggcacgggcgatggccattgctttttctgggacatcatccgtgatggttgagccagctgcaatgaaggtgtgatctgcaatttcaaccggtgcgacaatgtttgagttgctaccgatgaagacatggctgccaacatttgcgtggtgtttagccacgccatcatagttaacaaagactacgccacagccaacattaatatcagtgcctaatgtggcatcgccaacataacttaaatggccaatcttcgtgcgatcgccaattttagcattcttcacttcacagaagttcccaacatggacgtcttcgccaatttcagcgtttgggcgtaaatgactgttaggcccaatgtttgaccccgtgtgcatgatagctgattcaatcgttgaacttgtgatttgaatgttgtcttcaattgttgaatcaataatagttgagccagcaccaacgaaacaatctgaaccaattgttgtgttcccttttaagacgacgttaggttcaacaattgtatcattaccaatctgaacgcccacttcgatataagtattttctggatcaattaatgtcacaccattacgcatgtgttctgtattgatgcgtttacgcatcacttttgttgctgcagcaagagcaactcgatcattaacacccattgattcttcaaagtttggcattctgtaagcagcgacaatttcgccttttttcttcaagatttcaaccacatccgttaagtagtattcaccttgtgcgttctcattcgtcacttcgtgcaaagcttggaataaggtcttgttgtcaaagcaataaacgcccgtattaatttcattaacagccgcttctttatcattagtatctttttgttcaacgattttttcgacaatcccgatatcattccggataatccggccgtaacctgttgggtctggggccgttgctgttaaaatcgttgcctttgcgcctttatcatggtggtatgcaaataatttttcaaaggtttcagcggttaaaagtggcgtatcgccactgaccacaatcgtaatgccatcttcatctttcagtaaagcttcagcttgtaaaaccgcatggccagtccctaattgttcagcttgtaatgcatattgtgaccggtcgccgagataatctttcaccttttcagcgccgtgcccaacaattgtgaccacattggttgggtgcgttctttcaacttgggttaaaacatgatctaccattggtcgaccacaaacctcatgtaatactttatataattttgacttcatgcgagtacctttacccgctgctaaaataattgcatttttattaaccatcataagctcctcgtcattcgtgattactggtctattttagcttaaatactaggctagagcaagctaatccgtattgaagtttagcgctttatcccgtatactggaggtactttattgcggaaggaagtcggccatgccaaaactgacaaacaacattcgattaatgctcggcagcatcattgttgccattgccttactagttggtgggtattggtctacctcagctcggcatcaaacacaccaagccgcagtcacgtcctctaccaaatcacaatcgcatgcgaggcaacaatcgataaaatcaaaaaaagcggctcacccgacaccaattgactggcgtgcgccttccgaaaacaaaccatatcctaatttagacgaacaacccgatttatgggtcgacgtttcaattgcacagcaacgtgtctaccttaaaaatggcaatgatcttttgtacacaatgcatgcttcgaccggttcccctgagtcacccacaccaactggtaccttctatatcgaagctgaacacggcgactcatttttcaatgcaaattccggggaaggtgccaaatattggcgctctttcctagatcatggtatttatctttttcacagtgtgcccacagatgaagctggcaatttcattccagaagaagcagagcaattaggcaaaaaagctaattcacacggctgtatccgtttatcagtagctgatgcccaatggttctataccgcaattccatataatacaaaagtcgtcattcactagcttgaatgacgactttttacttaataacgttcaaaaggagatgccctgatgactcagacaacccaacaaacgattgccacggcttttaaacaattaatggttgaacaaccttttaataaaactagcgtcaccaccatcatgaataaaactggcattcgacgccaaaccttttatgactatttccctgataaatatgcgttattagattggatttacgatcaagaaatcggtgtctacatcgacgagcatctcagctatatccattggacacaggtgttggcgcaactatttaactacttcgatgctaaccgcgccttctatcaaaatgctttgtcgattgaagggcaaaacgccttcgaacgccattttattcatcacgtccatcaactgattaatcggattattcaagatcttgctagcgcccatcacattacgttatccaccgactaccaagcctttttacttagttttctttccaacgcattagttgcttacaccgctgaatggctccgcagtcgtcatccccaatcagtttcaaaagtaatcactgccctaaaaatgacattaactgatacaattaacggtttattattacggacaggacacttatatgaacaacggtaattataagataatcccatcaaaatttaatttcatatttattgaccattcttagcgtagttggcttccacagctgctttttctgcttgccaccagtcttcattgtcacgataccagtcgatggtatgttgtaagcctgatttaaaatcagtgaattctggttgccagcctaattcttcccgtaatttcgttgaatcgatggcataccgtaagtcatgacctggacggtctttaacttgatcgtaagcatctttgggttgccccattaattctaagattaattccaaaacatctttgttattttgttcgccgtcggcaccgattaagtaggtttcaccgattttgcctttggttaaaattgcccaaacggcgcttgagtgatcattcgtatgaatccagtcacgcacgttttgtcctgaaccgtaaagttttggtcgaatcccacttaaaatattggtaatttgacgaggaatgaatttttcaatgtgttggtaagggccataatttgtttgaacagtttgaaatggttgcttgtaggccgaatgaacgcacccatgcccggactaacaagtctgagctcgcctttgatgatgaataagggctacttgggttataacgggtttcaggagtgaatttttcaccaacgccttcgccatgaccaggtaagtcttcacgtaatggtaaatcaccgtatacttcatcggttgaaacgtggtgataacgcacattatacttgcgacatgcttcaatcaacgtatatgagccgataatgttcgtttgaataaagagtgaaggatctttcaaagagttatcgttgtgactttcggcagcatagtgtaccactgcgtctgtcttttgaactaacttatcgactaattcagcgtcacagatatcgccaacaactaattccacacggtctgctggtaaaccggctaagttagcgcgattgccagcgtaagttaatttatctaaaaccgtcacgtgaacttctggatggttattcaccacataatgcacgaagttagaaccgataaagccggccccaccagtaacaataatatttttcaacctgaatcttcctaataatatgttaatcatagtattccagtgaaggacagaccgccgaaattactattggaaagatgaatgctgatactttgggcgttggtcatgattggactcctggaacacctgaagatacagatcctgtacatccaactccagctgttccaggtaaaggtgttgacttaagcgatgctactaaggctagtcaatcaattgctaatattaaagaagctattgacactgtttctggtcaacgtgctgacttgggtgctgttcaaaatggtttgaaccatacgatcaacaatctgggaacaacaacagaaaatctttctgaggctaactcacgaattgaagatgttgatatggcagaagaaatgatgaactttacaaagtccaatattctttcacaagcagcaacatcaatgttggcacaggctaacgcaatgccaaacagtgtcttgtcattacttcaaggctaataaaattgaaattaagccgatcgtcgtttattcggcggtcggcttttttaataacaagatggagtgaaccggttaaaagtcgggcactagcggacttggacaataaatcgtgatttgcgcttgttggcgaagttgtatttgctcaacctaacgaaagcaaatttagtaaaagatggatagaaagaatttaactagaaatattggagtgaatatatgtaagacacggaaagaagggacaggtaacatgcagatcaataatattccaccagtcgaacccacgccggctattaataaaatccagaaagttgcgactgatagttatgaaatggatacttcattaatggatgaatcattcattcgtaaagatcaggaaaaatatttgggtaaactttttcagttaaatgatggtaaaaacgttaaagaagttgaggattcagccgataatgtagtcgtagacccgcaagaactgcaaaaagcagttgatacattgaataaaaagttactgggtcgcgattttaaaatgaaattcgaaattcatcagcggactggacggcagtacgttgaaatggtggatatgcaaagcggcaaagtgttaaaggagatcccttctcataaaatgcttgatgttttgggaaaaatctgggatcagatgggaattgcggtcgataagaaaggatagtgacgtaaatggctgatattacaagtgctacttcaacacccaatgcaggtctcagctttttgggccagtactctggaatcacaacggatgttgttgatcagttgatcgaggctgaatctggcggtaaaacgctgttacaaaataaggttacaaaatataaccaggaaaagtctgcctggagtgaaatttcatcagctttaagtaattttcaaactaagcttaaagccttgcagaataatgacagttattattctaaaattgctaaaagctcgaatgaagatcttgcaacgatctcaggaaattccgacgccaaaaatggcggtgattttgaacttttggtcagtcaattagctaagcaaactaagttgactggtagccaggtcagcgcagcagagacgaatagcactgatcttaacttgaacggtaaactgacttttgcttatcaaggagaaaaaactgacgatagcccagaaactgttgatattgatattacagagaaggattcactactcgatattgctgataagatcaataaagaatcaaaaaatattggtgtttcggcggtagtgatcaacaaacgcctagttttgacgaataacaaatcaggtgctaaagaaacaacactggatcaaacaaagaatacagctactttagctgccttgggcttaaatacttccgctgatctgggtcaggctgccaagtatagcctagacggcattgacatggaaagtgatagtaacgtgatctctgatgcgatcgatggtgcgacggtcaccttgaaaaaagagatcaagcctgaagatgccgtcactttatccttgaagaatgatgattctaaaacagtcaaggccgctactgattttgtaacacaatacaataacttaatgagtttgatcaaaagtaacttggatgtgggcaacccgtcagcttccacagcggaaagttcttcgactaatgttcaaggtaagctggttggcgattcgaccttgcaacggctacagtcatctttgagaaatatgatcacacaagccgataaagacaatggcgctagtctgagtccttttgatatgggcttttccgttgacaaggatggtgttttgagccttgatgaagacaagtttaagtcacagttagctgattcaccggaaaaagtccatgactttttctatgttcaaggtgaggacagcttcgacgaaagtacggacacgggctatactgctaaattaaataatctagtcaatgaatttattagcaacgatgctactaaaaagggaatcattactaataaaagcgatagcattgataagatggtcaaagacttgaactcgcagatcgatgacttcaccgcgcgtttggccgataaacgggaacaatatattgcacagtttacccagttagactcgatcatgatgcaagctgattcacaaatgcaatacatgcaaagccagttgggtgtagatcaacaataataacgatcataaaagaggagcagaagtttggaaaaacgagaagttgaacaaatattaacgaagttaaagcaaaatatgaaagactgggaccaaacaactgcttccattctagctttactacaagccaatgatcaattattgactcaattgcaggaaactgagtcaaacttgtcagcgcagcaaaaagtggttttacaacaagtaatgtctgaatatcagagtctgatgcaagtaacggcgaaagagaagaaaaaagtgttgcagcaattaaagagtttagatcgtcaaaagtcttccaggggtgggacttaccaccaaaaaattaccgatgggacgatgatcgaattagaatattgatccgtgacttcaagctggaattacaaaatagttaaattgatggcgggggaattgaataaatggatgtaaaacaggcacaaaagcaacgtaatttttatttgaagaatcaagtgttgaccgcttcgcctaacaagctgatcagtttattgatctctgggggcatcaaagcaatcaagttagctgaaattgcattgaatcaaaatgatatggtaaaggcaaatcatgaattgcttagagctcaagacattgttgatgagctgaaattttcattagatcattcggttgatagtcaaattacgacagacttaaatcgtttatataactttatcacgcaacaattagtggccgctaatgtcagcaaagacaaggaaaagctgccgcccattgttaaattgttagaagaattattggaaacttggaatgaagttagccaaaaacaaaatatttagttgaaacgactacaggcttgttaattctgtagtcgttttatttttttggaaatttttttaatgagtttccttaaatcttttcaattttgtccgataaataaaatggaagagtgaagaggaggagaaaaaatggacctgtttttactgatcggtatctgtgccgcgttggtcatcgtggtggcagcgatgattttaaaaggtgctagcttagccatgttatttagccccgaggccatgatgattatttttggggggatcattgtagcgctgatcaatacatatccgctggctgacatcaaacgtttaccaggaattttcaaagtattatttcaagcaaaaaagtatgattaccgcgcaacgatcgataaattagtagaattatcaaatgttgccaggcgtgaaggcttgttggccttggaaacgcctgttaacaacttagatccagaaaaagatgcgtttttaaaacgcggcatggagatggtggtcgacgggatcgataaagaagaaatcgaagaaatcatggaaaatgagatctcatcgatcgaggaacggcatgctaaaggaactgccatgatgcaaactgccggcagtacttcacccacacttggtgtgatgggtgccgtgatcggcttgatcggtgcacttggacacttagataacgttagtgtattgggagagtcgatctcatcggcctttgttgcgacgttatttggtatttttatgggatacttagtgttcatgccttttgctaaaagactgcaacgtaaatcagaacaagaaattcaaaatttagaactgatcatggcaggaacattggcgatcgaagaaggagtttcagcgaaaacaatggaaaagaaccttgaaagtatgatcagtgaaaccagacgaactgacattgaaaaaaatgagtagattggaaagaaagtgggacaggcatgcgtaagaaaaagaaaaaaaatgatagtgatagtgaagcctggatgctcccttattctgacatgttaacattgctacttgccctgtttattgtgatgtttgcttcagccaaggtcgatgatagtaagttccaaaaaatcagttcagagtttgggtcgatcatggctttgtcaccagagcaacaaaatcataaaagtgcggcagtcggtggatcaaacgcaatcgaacttgattcaccatcagtaactaataaagaaaaagatagtcaggcaccggaccctaaaactaaaaaagcagcgatcaaacaagaaaatggagtaaagggcagtatttcacaacagaatcaagaacagcaattaaaagaaattgctcatagtttaaacgaaactgctgcagagatgaacttgggaaaaaacacaaaagcttcactcaagtctgacggactacatttaaatttggatagcaatattttatttgacagcggtagtgcggatctgactgccgattctgctgcagctttaaaggaactggggccaaaaattcaacaactaaaagaaaatgaggtcattattgctggttatacagataatgtgccacaagaatcgaaagactatccaagtaactgggaattgagtgctgctcgagcagtttcagtcatgcggttcttcgtgcagcaaaaggcagtgacggaaggcaacgtctcaattgaagcttttggtgaaaataaccccaaagcaactaacgatacatcagcggggcgtgctaaaaataggagagtggaactagtgataaaaaaataaactgagcaaattattattgaaaatagttgaagtacattttcaatatggaatagcgaaaaatgaaaattgggtgggtaattcggttattcagtaagaaaatctcattttcttcgcaaaaattatttcaacaagaataatttttgaaatataatataagtaaaaaatgccaaaaaaatgactaatttttaaatttgtatattaacaagcaaatttattagacattctttaaatttatatataaattagcaatcaaggcgctttcaaaatttttgtggttcagaaatggcatacataaatgcgatagttcgccttttttagtctcttgaaatgtcaaattaagttagaaataacatagctgtttatctgtgatgttttccatgaatacctcaattggtgttttataatttaatgattttcttggaatacgattacgccggctactgacttgttgaactaaagcatttggtaaattgcgaaaatccatgctcttgttgagaccatctcgtctaattagtccattattattttcgtttaagccacgctggttaggagccccaacttcggcaaaataagtactaatatcatgcttatttgcgatttctttccaaccagtgaattctttaccattatcaaaagtaattgacttgaaaaggtgttttggctgttgggacaaccattgattaagatgtttattaacgcattcagccgatttttgttggatgtttaaaatgatttcaactttggagagacgctcaactaaggtcataactgcaccttgatgtgctttgctttggacggtgtctgcttctaaatgaccaaattcatgttgaaaatgaggataatcctgatagcgttgataaatacttctgccgagtcggccagctttaccacgccgttcaacgtaaccatttggatgccttttacctttcattggcaacaatttcacattgaaaacacctctttgaaaaagtcggtataaggttctcatactacaactgatctgtatctcagctcgaacaataatcgtatcaggggtccaacctaatgcgagtttctgcttaatgtatttggtttcatcttctggtaattcaattgcttttcgaccgcaatgagttttattaactcgatgattttcttgaaattgactaattgaattaccagcatctagaaaccggtaaacacgataaacggtttcgctggaacgtttaagagctttagcggcatgataggctttaatatcttatttccaaaagttatatataaaggttaattcacatgtggtaagatgtttataagtcatttgtggttacctctcttttgattagggatattcaaaagtctaccacaaatggcttttttatttctaacttaattttacaaacgacgagttaaaaaaataattaataaaataattttgaacatcttagagcgattaaagcactataataaataaaaactatccacaacctgattgggaagggtgtggatagtttttttgtggaaacgtgctttttaattgcaacaccttccgcttaatctaaaatgagccttaatctcaaaagacgagattgaggctcatttttaattaatgctcagaggcaaatcgctttaacagcactctatgctttgtcgaagtagattgttgcgattgtgcctaggatgatcatagcgatgatgagtgcgatgggtcctagtagtgctgtggcggttgttagggctggccaggctggtgcgacgccggtttgggcaagaatccagatggcggcaatgacaacgccgagcacaccggcgtaaacgtattcgacgaagtgtgctaataggtagtgcattaatttagcaacaatcacagttccgatgacggccccaatgatgaacggtaagaggagcgcgacgcttttgaacgcttctgtggcttgtgtcaagcgtcctgtgacgaggtagaccattaagtcgagtagttgactgacagcgtgataaacagtgccatattgcttcacaatcatgagcatgattgacccagagacgcctgggatgagcatgagtgatactgagaagaagccggcaaatagtaacgtgccaaagtcttggagggtagtgagttgtttgatagcgatgtcggattcagattggtgaccaccaatctgggtgagtagtagcataattgcgccacagacgatggcgattaacactttttgccagttgagtccggcgagtctacgccagatgaatgggagactgccgacgacaagaccgatgaagaaactgtatgccgctagtggataagcggtgcataaccaaagaatgattttggtggagagtaagacgccgatcccagcgccaatcccgattggccataaaaagccaattgcttggcgccaatcttttttgaattgcgcgatagccgccagaagcggttcgtatagaccaacgataacggcgaaaatgctgccagatagaccaggtattacgagtgcgacgccgattagggcgcctttgagtgcgttaataagtggcataagcggttctcctttttgtatgaggggacttttatttggtgggaattgtaacgggtgttgaaggtaatgggacactagcttcattcaaggcttgcaagtaagcctgtaagaaagtacggttagtggcagcttgttcgccgttagtggtgtgcataacaatctggtaagcaaggacaccatctgcgagggtggttaccccgagaatcgtagggccatcttgtatttcaggatgtttgggcaccagttgcacattgacttcattgacggttgccgctaacagttgtaagtcggtgtcgggtaagatgcgaatgttaatcagaacacgcatatcattgcgggataggttgctgacgatcgagatattgcggttaggaatgaaatttaaggtgccatcgtaactttgaacttgtgtggttcgtaagccaatcgcgttgacggtgccttctaccgtaccaattttaaccatatcacccacatcgaattgttgttctgcgaggatgaaaaaaccggtaacgatgtcgttgacgaaaccttgtgcgcctaacccaatggctaaactgaagatcccagcgccggcaatcaaggtaccaacaggaacgccgagaacgctgagtagcgcatagagatagaagaaaatcacgaggtatgaaaaagcgttgaccatcaaagtataaatggtgttcatgcggttacttgagaaaccatcagttttgcggtattttctgaagctgcgcttaatgatgtatttacctaagcgattgatgaggtagaataaagcggagagtaggataatttgaaacaatccagcaacgagggtgctgagtaatttatcccagtcaattgaagtgatgtagcgcataaaaatattggtctgtttctgaacagattcgaccggagttggtgcggccgctaataaacgtgtgaacatgcgtgaaactccttttttgtagcatgtctttagtttagcaaatgtcagaaaaaatggcacctaatatagtgaagataattgaaggttaagggaaataatgctattctagtctttaagagacaatgtaatagataacgaagtaggaggaacaaatcaatgacgggtggtcaaattgcggcgctaatcgccgcaggggcttttgcggtcctagttgtttttctaatagtgatgctattaaaagtcacaaaagtattaacggatgtttctaagacagtaacggaagccaacaagagtgtcacggttgttactgagaatgttgatattttatctaaagaagtagaaggtttactcagcaaagccaacgtattgctagacgatgtgaacgggaaagtcgctgacttggatcctgttttcagagcggctggcgaacttggcgagagcgtttcaagtttgaatacggcaagtcgcaatttaacggaacatgttaccaacgttgggcggacaaccgctaaggcaacggtcgcttcgaaggttggcgcaagtgcattaagattttaccaaaatcgacgtcaaacaaaggataaggagtaattctcatggcaaaaaaaggacattttctattaggtgtattagtcggtggcgcagcagccattggtgcaacattaatgttaactcctaagacgggtaaggaattacaatcaaaattagtggacttaggtgatgatttaatggatcgcgcacaagactactactatttagcaagtgaaacagcagcagacttaaaagacgacgcaaagctacacatgaatcgcgtccatgattatgcaagtgattggcaagacaatgcgtctgatatcaaagaacaagcaaaagcacaatttgatgaaaaaacagcagacttgaaatcacaatttggcggcagccttgaagctagccaagaagatttcgacgatatcgtgatcgacggcaagagtgcatttggccaagccaaagacgaagcagccgccgctgttgaaactgttcaagaagaagtcactgaagataaataatcaatgaaaaagcccccgccaagcctgatttagcgggggcttttttgcttgtttgaattgacgactagtgcaaattttaaaagtcggtgttataatgaaaacatagaaaaagagccgtgcgacaacacgactcttctccacagtccgcttaagacggtggcaagtttttggtaaaaaataaccgtgactcgtcaaagtttagacggttattttttttgattaaatttcagaatctcaatgactaacatggcaaccgaaattgccaacatcagtgcgttgaaaaccgacatgttatcctttctcaaggtaacgcttaatcaacataggcatcacctcatttctgagcgttagccaccgtcataaacttactgttaggattactgtaacatagtttgaatggttaacgactagggattataaagttctttaaaacaaaaggcaggcgaaatcattttgtgatttcgtctgccttttttaattagtgctcagttgctgaccgcaattaagggcactcttattgaaacgtgctgtttcaaactgccttttccggttaaccaaaaaacgcgaatcatgacgaaaagcgtcataatccgcgtttttaagttaatcctcaaagccaacccgtttgaatcagcactcttagaatgtttgtagttcttttgtcatgtgtgtgaaggcttctgatcctgtttctgttacgtggacacagtcttcaattcgaacaccggcaacgcctgggatgtagattcctggttcgattgagaaacacatgcctggcttgataatcatgtcgttgccttccatgattgatgggaattcgtgttctgaagttccaatgccgtgacctagacggtggatgaagtattcgccgtagcccgctttagtgatgacgtcacgtgcaatcttatctaattcagccgctgtgataccgggtttgattgctgcttgggcagttaagtttgcttcaagacagactttgtggatttcgagtgatttcgcatcaggtttgccaaaagcaacggtccgcgtcgcatcactcatgtaacccttatgcaatgtcccaaggtcaaagagcacgagggcatctggggttaaaatgttggcttcggggccaccatgggggttagctgcgttgatacctgattgtacgatggtatcaaaactcatatgcataacgcctttgcgcattaatgcgtattcgatttctgcaacgatatcttgttctgttttacctgcttttaaggcattgaaaccaacttcgaaagcataatcggcttcacggccggctgcttccattaaagcgatttcttcaggtgttttaattaattttaagttttccatgaaacgtgaagcgtcgcctgggaatgttgcgtctgggaattgctttagaatggcttcgtaacgttgaacaggaaggtcgtctttttcaagtgcccaacgtgtagggttcgcattccgtttcttgatttgatctgcgatgattgcgtatggatcttcgtgatcgagatagccgtaaacgtcgagtttccagccagcttttttagcagattcaacttctaattgtggtgtaaataggaatgggtcctgatctgcaaaaacaaagagggctaagacccgttctgcaggatcactttcgaaaccagtgaaatagaggatgttggttggattactgatgtaagccacatccatattattctcaccaagccaattttgtaattgggctaattgattattcatctaaagcacttcctttacaattgatatcactagtatatcacaaccaatgtaaacggtaatgtaaaccacaaatgaaaacaaaaatgtaaatttcatgaaaattagtgtaaaccgcttgcatttgctttaaatctctgttaaattaatcaagaagtaaaatgaaaactgctgaaaatataatctattttattttacaaatgaaaggaatcatttaatcatggaaaaacaaacaattacaatttatgacgttgcgcgcgaagccgacgtttcaatggcaactgtctcacgagttgtcaatggtaacccgaatgtgaaacccgcaacacgcaagaaggttcttgaagttattaaccgtcttgactaccgtccaaatgcggtggcccgtggattagcaagcaagaagacaacaacggttggggtcatcattcccgacgttagtgacatctattttgcatcacttgctcgtgggattgacgatgttgcgacaatgtacaagtacaacattattttggctaactcagatgaaaacaaccaaaaggaagttcaagtgttgaataccttattggcaaaacaagttgacggtttaatctacatgggccacagtatttcagacgaaatccgcgctgaattctcacgttcaaagacaccaatcgtgttagctggttcaattgatccagacgaacaagtgggtagtgttaacatcgattacgttgccgctgttaaagatgcaactttgaagttaatcaaaaatggtcatgacaaagtggcgttcgtttgtggtagcttgaaattcccaattaacagcaagtatcgtttatgcggttacaaggatgccttgaatgaagcaggcattgcttatgacgaaagtttaatttttgaaacagaatacagctacagtgctggtgaagcattgttcagcaaaatcaaagcaactggggcaacagctgctgttgtcagtgatgacgaattggcagttggtgtcttgaacggggcagttgatgccggcgttcaaatcccagctgaattcgaagttgtgacaagtaacaacacgaagttaactgaaatggtacgtcctaagatgacgtcaatctcacaaccattgtatgatatgggtgccgtagcaatgcggcttttaacaaagatgatgaacaaagaagacgtaaacgacaagacaatcctattgccatacagtatcgtagcaagagaatcaacaaaatagagtgctattggttgcggtcagcaattgagcattaataaaaaaatcccgttaatccaggttttaggattaacgggatttttagattaagcggaagttgttgcaaacaagagtacgtttccaccaatcaaaaaaggcctcagttccaaacgatcttgctggttaaacaactagaatgagaacttaataaccaccaaatgaaagcgttctaatttaaggccgttttgttttgacaatgcttgataagtggcttacatttaattgtgaaggatagcacaacctatccgcagacatttgtgtcaattcaaatggaagaggtggccagaatggcaacgaatcaattagtattaaaaaccgcagacatttgcgatatccgggatattgaggaagcacgggcaaccattaaaccgtatattcgcgaaacacctttaattcaatcgatgttcttgagtcgtaatgtggcgcacggtcatgtctatttgaaattggaaaatatgcagctgacgggatcgtttaaattccgtggtgcgaacaataaaattaaccatttaacgccagagcaacgggctaaaggcatcattacagcttcagccggcaatcatgcgcaaggggttgcattgaccgcgaagttattagggattgatgcgaccgttgtgatgccagaagaagcaccgcttgctaagcaacaagcgaccgccggttatggggcgaacgttgttttacatggtacgacttttaatgattcgcggttgtacatggagcagttagcagccgaaaagggcttaacaattgtccatccctacgacgatcgcgaagtcatggccggccaagggacaatcggccttgagattttggatgcgatttggaatgttgatacggtgattgtaccggttggcggtggtggcttaatctccggcattgcgacggctttgaaatcctttaacccctcaattcacatcattggggttcaatcggaaaacgtgcacgggatgacggcttcatttgaagcaggcacaatcaccagccatcatgcggacttcacgctagccgatgggacagacgttgcgattccaggtgaactgactttcccagtggttcaaaatctagtcgatgaaatgattttagtttccgaaaaagaaatcgcaactgcgatgaaggatctcatgcaacggactaagattgtcacagaaggcgctggtgcattaccaacggcagcactgctgagtggtaaaattgatcctcaatggttaacagataaaaatattgtggctttagtttcaggcgggaatgttgatttaacccgcgtttcgggtattattgaccaactcttccacccagctgatacaagcaaaggggttgttggataattaaaaagccggcatccgtctaaaaacggatgtcggcttatttttgtgctgcaagaaaggctggaccatgatcgtcaattagggcgtgaaattcttggcagtctttaacagtcatttggggtaagagctgtggttcaataacctgttgtacctttaaatagtggaggtcttttaaaagaacagtgctctaggtgagcaattaagcggcgggcatataaatcagcgataaagactgggcggtcgaagacatataataaaatgacatcggctgtttccggaccaatgcctttgatggcaagtaactggcgccgtaggtcagtggtggttgtcatctgattgagcgtgtctaagtcaaaatcaactgtcgctaaaaatcgaaacagccctttaattgtcctgcttttagcgttattgaagccgctgggtttaatagccaacataagggcttcatccgaaagagaaagcagattgtttggctcgaagtgcgtacttgatcgtagattggcgagcgagcggtcaacattttgccagtttgtattttgaactagaaccgcgccaaccattgtttcccaatgggaatcagaaggccaccagtgttgcggcccatattgccgatacattgtttgaaagagttggtagtaatcaattttaccgttcatgaaaaatgtctccttaacataaaaagacgctacttcacctttggcagtcacttattgtcaattcgcttggtgcgcagttgtagcagtttggaagttgtggctaatgagatggtggtcaaaatgatgaaaaaagtggttgaaagtaagaaacgcggcatctgcgccccagaaaattttaaaataatcgtggtaagggtactaaaagtggtgaggatgtttaaaatcatgagtgaaatttcgtagttgcccgattgtttcgaaatgacgtggccagcgtataataagccaacgccgaacaatatatatgagaaatagaaaataccgaagaaaacgatgaaaatagttaatgattctttggcgtagacgagaatatcggtactggtaaagatgcgaatcaaagtatttagaatctgataggtgagataaagtgttgctagatagataaaagtggggaagtttcgtttgataaaggccatagcaatctccattgttttttcattgtaaagcttgtcactattctagcatggaatttaagaatggtcagttgaaagtcagccgagaatgcgtttttatttgtaattaatatcatctgcgttatacttgagttgtgtaaaatagaataaggagtgatcaatgtgaaaattatcgttgtcggttcatctcatggtggatttgaaactgttcaagaaagtttactcgattatccggatgcaaccatccaatggtacgaacaaggcgatttcctatcgttcttatcctgcgggatgcaactctatttagaagggaccgtcaaaaacgttgatgatgtcagttatgcgacaccagaaggcatgcgggcaaaagggattgaagtcaacctacaacaagcaatcaccgcgattaacgccgatcaacatacggtccaagtgaaggatttaaagaataatacaacgcgtgaagaaagttacgataagttagtcttgagtgtcggcgctgtaccatttgaattaccagtgccaggccgtgatttagagaatgtctacgcaatgcgtggccgtgattgggcgattaaattaaaggcgaagacagttgatccaaccgttaaaaatgttgtggtgatcggttctggttatattggcattgaagcggctgaagcatttgctaaagctggcaaacatgttacagttgttgatgtcttgccacgtctattaagtctctatctcgatcaagaatttacagatcaattaacggctgaaatgcaagcgcacaatatctatcctgcagttggtcaaggcgtcaaagaatatgtcggcgttgacggtaagctaactaaagttgtgaccgatcaagctgaatacgatgctgacttagtcatcgaagctgctgggattcggcctaacacaggctggttaaaagatacattacaactcgaccgcagcggccggattgaaatcaatgaattcttacaaacaagccaacccgatatttttgcagtcggggatgcaacggttgtgaaatacgcaccaactggcaaagaaatgccaattgctttagcaacgaatgcgcgtcgccaaggtcgctatgctgctaagaacttagtcaccgccaaccaaccggtacccgctgtttcaggttcatcagcattgagcgtcttcgattatcactttgcttcaactgggattaaagaaggaacggctgataaaatgggtgtgaagacccaatctgttttggtttctgaaacatatcgcccacacttcgtccctgaagcagaaaatccagtggtcgatttcaaattaacctttgatccagaaacacggcgtgtactcggtgcgcaaatcatgtctaaagctgacgtgacggcaaacatcaacgccatttcacttgccattcaaggtaagatgacaatcgatgatttagcatacgctgacttcttcttccaaccaggttttgaccgtccttggaacatcatgaacgtcgccgcccaaaaagcacaacgacttttagacaaataaagtgcaagcagctgtcaattgaagattgatggctgctttttgtgctgacatggttcgccaaataggcttgatgaagacggtgattgtcattggattcgtgtattcagctggtgtattgctcttaacggggcttacgcttggctattcaagtgtaagacgttggcttagaaagaatcgctaataaaaaaggattgtggatcgataaaaatatcgattcccaatccttttttactatattacccaataccgatcacataatatgcgagtttatcggcgtagtgtcgttggttattttgttgtttagcttgcttaaccgcggtgagattgtcggtgaccacgccgtctgcaccgaaatacatcatgcgttggacggcttgttgatcattgggtgtccagacaaagacggccttattttcctgatgtgcagcttgaatgaagtgactgttgacagttgtcatttcaacggcataaaaatcagcgttcgaaattggtgggccgataaaattaaaggggagaatgtagcccgtttgaatcttcggtgctacctttttaacggcctcgacgatgtgccagtttaaggattgcaccatgtgaccgtgagcttcgatattggcctgatacttattcaggaaatgttgcaccaagccgggattatcggtggtgggtgtcttaatttcaatcagtagtttttgatgaagctgattggcgcgtgcaagatagacatcaaatgaagcaattggtgcggattgccgatgttcatggacggtcattttagtcagttgcgccagtgttttagactgcggggtccctgagtgcccagtgagtggggcaagttggaagtcgtgaaagacgacgaattggtgatctttagtcaattgcacatccatttcaacataatcgggctttaatcgggtagtttttcgcagcgcactaatcgaattttggacgccgtctttttgcgaaacgccacggtgggaaatgcttagcggctgctgaatggttactgaacggagatagtcccaattataagtcccaacgccgattaaaacgcaatttgctacgaataataaccaacgaccactgagcggcacgcttaattttaaggttgcatagttgaacgtcggttgcacaaattgtgggtcggccaacaaataatcaatgacgatgaaaaagacggcgactgtcgaaagcaccaagttgatgagcatagcagcttgcaacaaggtcatgatgaccacggcacttggcagtcccactgatgtgtgggtttcaatcaacgcttgtagttggatgagtaggaaaaaagtgagtcccgtaaagccaatcagtgcggcaccgattaagagtagacgccccagtaatgagccagttttttgatgtgtaaaccgccaactactggtcaacgcttttttgaaagtcatctgctgaagaatgatgtttggtagggtgaagatcagccgtaagccgagatataataagcccaaatagacaagaatgaaaagtcccgcgacaattcgccgattcatgagaatataatccagaatgaatgccggtattttaaacttagtcaataaatcagaatgatagccaagcccgcccagcggtaaaattaaaagacaataatatagaaagaaaaagaacgtgccaattcgaaggtgcctgagttgcgcaaaagtcatcttcagcaatgcctgcaaagctagcggccgtttaatctgaataaagtacacacttaatagaagaaacgtgaattcgaagaaagccagcaataaaattagtagcgcaattcctacgagtgctaacagcgcaatcggatgctgatgaataagcgctggcaagttgctcaacgcgagaaactggatctgattatgtaccagaatgaagtagctggctttactcaaaagcggtagacaaattaaaagcaaaaagccatgcatcaataacacactacgaaaataggcctgggactgctttaaaaaagtgaatgtacttgtaaatagggttttaaaatactgcattgaatgggtgctcctcaattggactcgtaatgagataattgtacaacaaatatagaagcgtgtaataccgattaatctttgtatttaatgaagagtttgttatagttattaagttaatagtatgaatgaaattgctaaagctatcttgtggaaataatgaccaaaaaatatttaagcgcgcgaactcggaccaaacatacatatgctttttataaagagcgacggaacaatccgcaatggcgcgacgattttattcaggttagatcgcaaagaagaaaagcattatttattcaaacgattgaacgtggtagtaatgaacgctttaatcggaatttacgttatttttatcctaaagggattcgttttgagcacattagtgctcaagatttaacgacgacgttactccaaattaaccagcgaccgcttaaaatactcgactggcaaacaccgtatcaggttatgctgacaaatttgtccgaaaattcggattaaatttgcaatctacccatatgcattgtaagtatgttctgaaacaaggttttcttcttcagtgaagacattgtattcagcaaatttgctttgtaggtctttgtatggaattaatttgttatcttcatcaagtaagatagcacgaccataaccaccgtaagcagcatcaacgtggaagtagaagtagatgccttctttaacaagtttgttacgtaattcagcaatttcgttgatgccgtcaacagcaccttcttcagttgagccaacaacgccgacaaccccaagaattggtgtttctgtgcttgctaattcacgaacgattttttctaattcattgatatccatacggtaatttgaatcaactggtactgggattacttgatccaaaccgataccgataatatcagcggcttttaaccatgaataatgttttgtttgtggaactaaccatttacctaacttgtcaagatctttaccaccacgagctgatttagctttgatttcatcaatcttgtcgccgttagcttcaactaagtccatgatttctttagttgacatgtttgataattcccagtctgtcttgcctgctacaatagtaggatcaacagccttcattgcaaatggaagtgacttgatgttacgtgcataccataaaccttccaagttagctaatgaaccgtcagctacgatgtggccccaaccatttgtgtaacccatcaatgttgcaaattctaaaccaacttcttcttccatttgtgaagttgctggtgatgattcatacgcaacgttattaccattccataacattgcatagttatatgccaaaatggctggtattaatgtttctgagttcatatgaccccagtaacgaccagcattatgtcaaggaactgattgtgaacgtaaacgtgctgaaagttcgtctaaaacgtctttcatgttgttaaccgttccttggaattcaggtgatgtttgttgttcagctgaaatcattggtttgtcttgtggcatgtagttttgacgccattcaagatgttcgtcaaccaacttacctaacaaatctttgtaaagttgaccattttcagctttatcaccgataaatagagcagataaatctgtatcttttgcactaaaactattgttactcataacaaaaaatcctcctaaattgtagatatagtataaccccaatcaatagaatacgctcattgtccataaaagcaaacacatgaaagcgattccgattttttagagtacgaaaaatagccgtcaaacaacgtttgacagctacctttgcagttgtattttggggttatactatatgatctacattcacgaagaacccagtaacattcagtatagatacaaaagccttcatttaatttttggaacgtctctagtcagtaacacgtgctaagaagtaattcttcttcccacggcgaataatcacaaacttgccatcaaagctagtcatcgggtcaatcatcgcatcagtttcttggatacggtcaccgttaattgtaatggcaccattttgaacatcttcacgtgcttgacgttttgaagattcaatacctgtatccactaagaagtcaacaatgtttttagcttctttactaatttcaactgatggtgctttaccaaaagcttgttctgcttcaacaacatctaaagctttgatattaccttcaaaaagtaattcagtaatatgttccgcttcatctaatgcttcttgaccgtgaacaaaacgtgtcacttcttgtgctaaacgtttttgtgcttcacgtttttcaggttctgttgcaactttttgtgccaattcttcaatttcgtcttcttctaagaatgtgaagaatttaaggtatttaataacatcacgatcatcttgatttacccagaattggtagaattcgtatggtgaagtcttttcagcatcaagccagattgcaccacctgctgtcttaccaaacttagttccgtcagctttcaacattaatggaattgttaaaccgtatacgggttcgtcgctaccttcaagtttatgaatcatatcaatccctgaagtaatattgccccattgatcagccccaccaatttgcagttggatgttatgttcatcatgtaagtgtttgaaatcaattgattgtagaatttggtatgtgaattcagtaaatgaaatccccacttccaaacgactagcaacaatatctttagctaacattgtattgatgttgaaattcttaccgtaatctcttaaaaagtccaacaatgagatttttgataaccaatcgtagttattaacaaaagtaacattggcatctttaccaaataatttccgcatttggtttgataaagcttcaacatttttttgaaccttttccattgtttgtaactggcgttctgaattacgaccacttggatcaccaattgatcctgtcccaccaccgattaagatgtatgggtgatgtccagctaattggaatcgcttcatcatcatgaatggaatcaaatgaccgatgtgtaaactatcaccagttggatcagtcccacagtataaagaaatcttgttgttttctactaattcatgcaatccttcagcatctgtttgttggttaatcgcatcacgccatgttaattcatcaataatattttttctcatcaaaatttcctcctaaattaaaaaagtcccagcaatctttaataaaataaagattactgggacgaaatgtcattttttcgcggtaccacccgtgttatattttgaaagtgcactttcaaaatatcactctagattttaacgtaaattcaacgtacgatttgataaaacaaaaagtgtaattcgacttagaaacatatgtcaggtctcaccaaatcccgactctctgtaatagtggttactaattctactgcgcttttcaatcgctttattaacttatgtgcttatcatagttcacatgataaatgaagtcaacacttttatgctatttttttataaacatgaacgattttattctaatttaaatttaattaaattaaattagaatagtcgtatttaattcctctaaattaaagttttacaacattcgcagcttgtggtccacgtgtgccttcaacgatgtcgaattcgaccgcttggccttcttctaatgacttgaagccttcgtcttggattgcactgaaatgtacaaagatatcgtcttgaccttctgctgagataaagccgaaacctttttcattgttaaaccattttactgttcctttttccatgatgttactccttttaaatacacaattattatctagccaccagaatcggtcatctaaacaagtcaattatacgcgattttgtaaccgcatgcaagcgtaaaataaattaattgagtttatatcgggtccgccgttgatattgttcgccaggatgcaaaacaatattaccaaactcggtatgatggatggcatctggcatcatttgggcttcaatcgccactgcttggtggggttgaattgcctgatttgttaagtttggttcgtccccgaagccattggcggtataaataacgattgcattcccttctgtatcaattgtgatcgagcggccactttcgggatcgcgtaaaatcgcatccgatttacccggcgtttgattcaacaggaatggatgatcaaaaccaccgaccaatttagtttgcgtattttcactatcaaaagcggcttgcaaagctcgcggttgacgtaaatcaaagacagagcccgcaactgggactaattccccggttggtaagccgtctggttgaatggcaccaaaacggtcactatcgatttgcaatgtgtgttggccaacaaattgatcaaagtcccccgtcaaattcagatagacatggcatgttgggttaaacaacgtggttttatcagtcgttgcttgatagtcaattagccattcattggcctcatttagcgtatacgtcgtggtcaccgctaaattaccggggaatccattttcaccatctggactcgttaacatgaaaacgacactaatcgcatcatctttttcaaccactgatgattgccaaatttgcgattcaaaactattggggccaccatgattcgtgttggcgccattattaatcggtgcttgataatcatgaccatcgagtgtaaaagcaccttgaccgatgcggccagctacgcgtcccactgtcgcaccaaaataagcttgttgctttacaaaatccgctagggtgtcatagccaatcacaacattggccatctgaccactttgatccggcatcaccaagtgagtaatcgttgcgccgtattctgtcacggctaattgatacccctgacgattctctagccaatactgccaaaccgtttgaccatttatttctccaaatgcttctcgccaatacttcatgaatgtccctccttataggttaaacatgttgcgtaaatttaataaatgctgcctgaccttgttcgttgcatttgaaaacaccagcgtcttctagaacgcgcatgaacactttgccgacttcagtccgcactaattccgttacgttatctgatgtaatcgatgtgttagcggctttaatcgtatctgcccattcttgatggtaagcggccatctggtttggttgatcgcagagatagtgttcaacctcagccatttcatctttgagtcgtggtggcaaaattgctaagcccatcacttcgattaaaccaatattttcttttttaatatgttgcacatctgcatgtggatgataaattccatctggatgttctgcagacgtttgattgtcgcgtagtaccaaatcaatttcgaattgaccgtctcgcatccgcgcaatcggcgtaatcgtatgatgtggtgtgccgtcttctgagtgggctaagatttggacacttggatcgctgtaattttgccaactagttaaaatttgtgcagcgagtgtttccaaatgcgttgcattcgcactcgtcaaacgaatgactgacattggccacttcacaattcccgcctgaatatcattatacccgttaaaatgtagtggtgtctcgattggcgccttagccattggaaaatcgtgacgccccccttgataatgttcatgggttaagatcgaaccaccgacaatcggtaaatcagcgttactcccagcgaaatagccggggaactgcttcacaatctgtaataaatttttgaaggtcgtttcattaatcaccattggttcgtgttgaccatcaaggaaaatcgaatgctcattaaaataagcatatggtgaatattggaagccccaagtctgacctgccaattcaaaacgaatgatgcgatgattacgccgtgctgggaaatctaaacgccccgtatacccctcattttccagacataattgacatttggggtagccggtttgtttcatcgttttggctaacgcaatttgtttcggatccttttccggcttcgataaattaatcgtgatttctaagtcgccatagtgcgtcggcacttgataagcgatatttttcgcgattgcggccactttaacgtagtcgttggcccgacttaattcataaaagtcggcaagtgcttgttggggatcactctcgtattgatgccaaaaatggcggttcaccgcacttggtaatggcgtcaccaaatccatcaacttcgcccctaaaatatcttgttctgccgctaaattctcaatccggctattcgcaactgcaagacgcaacaacgcgtcctttaatccgatgagactttgatcagtcaccgcaacgttactgtcctcttcaccaacaaggtctaagacgagattaaataagtactgttggtcttctgctttataaagtgtgtcttgaaagataatcactttttcaataaatgtttgaatcaattctcttgcttgcatatgctttcctctaccgatctgcgtatcctgctgtaaaagcgcgcttgtgaattaatggcggcttgatggccagtgacgagactgtcgacaacggcgacatccgtgccgcgttgaattaattgatcaacggtgtgcgagccgatgtagccggcgccacctaatactaaaactgtcatcttatcattctcctcttcagttgactgattaacctaattttttagcgccatcggcaatttctgccacgtagaaacttggcgcatacccaatcttgtctgtataaactttagcaacattcgtttcaaagttgtcgacttggtctttagcaacaattgcaatcgcacaacccccaaagcccgcaccagtcatccgagcgcctaagacccctggttgttgccaagcggtttgaacgagtgtgtctaattcgatcccagtcacttcataatcaaattgcaatgacacgtgtgacgcattaactaatttgccgaaacgttcaaggtcgttgttcttcagggcttcgcgggccttcattgtccgttggttttcagaaaccgcatggcgtgcacgtttcaacaagttttcatcttgtagcatgtatgtttgtaaatcaaaggtttcgttatctaaatcgcccaatgattgaatatcattcttcgtttgtaaaatggctaaggccttttcacattcactgcgacgttcattatattttgaatcggccaattcacggcgtttattagtgttcatgataataatcacgttgtcttgcaaatcaattgggactaaatcgtaatccaatgtgttcgtgtctagtaagatggcatggttggctttgcccattccaacggcaaattgatccatgatgcctgagttaacgccgataaatttattttcaaccatgacaccggttttaacaaggtcgacacggttaatttctaaattgaattggtcttctagaatcacacccattaataattcaattgatgcggatgatgataagccagcgccgtttggaatattgccttttaaataaatgtccaaaccactgtcgattgtgtaaccttgttcttgaaggtaaacaatcatcccttttggatagttcgcccagttgtgggccttttgataagataagtcgctgaggtcaaatgaaatgacacccgcatcttcaaagttcccagataataaattgattgtttggtcatcacgtttagcaacgactgcatatgtgcccaatgtaatcgcggttgggaaaacatgcccgccgttgtaatcagtatgttcaccaatcaagttaatccgacctggtgcgaagtagctcgcttccggtgctttgtggaatgcgttttcgaatgcggtatttaattctgtcatgttcatagtaaattcctcctttattaatcgctttcattttactaaacatttactaaaaaatcaatcttttttgttaactatcgctttcttttcattggttatgctaaactaagtaatagtaaacattgaattgagaggtgcaccttggcaacgatcaaagatattgctcaactcgctaacgtttcgaatgcaaccgtttcgcgggtcctaaattatgatcaaacactttcggttggcgatgagacccggcaacggattttcgaagccgccgaaagtttaaactatcgtaaaaacacgcgcaaaatgaaccagcaacgcggacgcattgcgattgttgaatggtataccgctaaagaagaattggaagatctatactacctctccatccgacttggcgttgaaaagaaactcaaagaacttggttatgacgtaacacgcttctttcaaaacgatccatttgatacgctccatgatgctacgggtgctgtggtaattggtaagtacagccctgcgcagattaagcgcctaaaaaaactcaaccacaacctcgtcttcgtcgacatgaacacgctcgattgtgaagtcagctgtgtgatgaccgacttcaaaacaccaattaaatccgtaatcaaccattttacaaccgctggcttaactaaaattggtatgttaactggtcaagagagcactgctgataatactaaattgggaccggatccccgttttattcattttaagacgttactcaaagctcaaaaaaactatcaccccgattggattttaaccggtgactttacacccgaatcaggttaccaactcatgatacaattattacaagaccaaagttccgatttaccagaagccctcttcatcgccaatgatgcaatggcagtcggcgctttacgcgccttacatgaatcaggcatcaaagtccctgaacaactcagcctgattagtttcaacgatacctcaatttgccaatacacgttccctactttaagttccgttaaagtttacactgaacaaatgggccaatcagctgccgagttattggttaaacaactcgccgctagcgaaattatcccccaagtcattacgattggcacgacgctgacactacgcaatagttcaaaataataccttcagcccaccgatgatcaattcatctcgtgggtttttatcttgtctcaaatcaattttcattaataggagtatctcttttgaaaacgaaaaaaattagacgaaccatcttaaccattgctatcttggcagtcggttatctcggtggtcgcaacaatgtcttacaaaatgtgttccttgctacagttgctactgagcaaccagctaaacaaacacccccagtcagtcctgattatcaagccatctctgatcaagattttaaaagcggatctgcggcctatctaccaattaataacgatcaaagccaattaacagcaacggattggcaaggtgaaaaaatcgtctatgggcaactcgaccagcttaaccgaacaactagcgtcacagcttacttatcaaagcggaatctgggcaaatcagaaggccggacgcgccaaatttggaatccaacgggttggcataatcaacctctgattgtcaatgaccgccgaatcacaccgcaaaatcgtggccacttgattgcttatacactcacttttaattttgatcagaatggtaactttcaagctggtcaaccgggcagcttagataatccacttaacctcgccacccaaagcgcgtacagtaatcaaaaaacgatgcagatttttgaagaaaaagtccgcactgcgctcgaagcaaacaaaaaagtgatttacaaagtcacgaccgtttttcggggtaatgaactgatgccgcgcggttactgggttcaggccatttccacagatggcacgctgaatttcaacgattacgtctggaatgttgaacctggcgtcgcattcgattacatgactggtcgttctcacttagatgctagcatgcaagtcaaagacggtcagaatattgttgaccgcaccaaacaacaagtcaaacaacttttctaaacaacaaaaaaagaggtagcaaccagaataattctagttgctaccttttttgttagcttatttttccattgccttacgcaatgcagcggctaatggactttccgccggttcatcttcttggttcactttttgaatcaagctgcgttcttcatgtttagaaattttcttcttacgatctttcttgtcgagcatcttttcagttgtcccatcattaagacaccggaagtatgcgccgccttggccttcaataatcaccatttttttgtgacatcgtgggcagcgatggttggaaaccttcggatctttccgacgccgatagtgacagtttgtgcagacataaattttaccgtcacgcgtattgcgttcttttaacggatgatcacattccggacattttttattcgtcactgcaaaatcgcggtattccgtctcactctttttaatctcaccgaccaaggtcttagtggcaccctcgatttcagtgatgaacgccttcggattttcttcgcctttggcaatcgcttcaagcgactgttcccattttcctgtcagttctggtgaaaccaaggtctgattaaccaattttaaaagttgctgaccttttggcgtcactgctaaagcatggccttgtcgttctaggagttcactacgaactaatttctcgatgatttccgcacgagtggctggtgtccctaatccgtagtgttccatcttcccgagcaacgttccttcagttaatggcttagggggcgtcgtcaattgttctttaaccgcaaaattagcccgaactaccatcccttctcgccagtcgaccgtcgcggttggttgcccctctttatcggcagcatgccaaccttgttgcacgacttttgtttgcttaaacgtaaaggtttgatcaccaaacttaacggtggctttcgtaacagctgtcacgtatggatcagcaaacaaccctaagaagcgttccacaatcaagcgatacatgcgtagttcatccgtcgataatttttcggcacgaacgggttcttcagttggaattaaagcgtagtgatccgttactttgccatcattaaagacggctttttgtttgacctgactgccttgccccaagtattgcttagcacgtggatcaaatttgactaatgccgacaaccgttccttcaaagtcccttcgatatctgttgagagatatttcgaatccgtccgtggataactgacaactttatggatttcatacaatgattgaatcaaggataacgtctttttcgcggataagccatactttgcattggccacttgttggagttccgttaaatcatatggtaaaggtgctgattgcgatttctgcgttgttttgacgctgaccacttggcctttggcttgttgcaattgtgcaactaagtcgtctgctgcttggcgcgtcttaatactttgcgggtttgctaattgtaaggcggcttgctgttgatcgaccgtcaagtgaattgtgtaataggtttgcggtttgaaacgattaatttgttgtgccgtttcgttcacaaaggctaacgttggtgtctgcacccgaccagcggataaattatcttcatacttggtcgtcaatgcccgtgtcacgttcaagccaatcaaccaatccgctttgccgcgtgctaacgctgatgcgtacaaattatcgaattgcttggctggttttaagtttgcaaaccctgctttaatggccttagtcgtttgcgatgaaatccagagccgttcaaccggcttatcgaatttaatccattccaaaatatagcgcgcaacggcttccccttcacgccccgaatcagttgcaatcaccgcacctgaaatatctttgcggttggcgaggtgactgatagcttttaattgtccacccgttttaggcaatggctttaaaccgatatgcttgggaataatcggtaagtcttccaaacgccattgttgccattcttttttgatatcctctggtaattgcagcgataacaaatgcccaaacgcccaagtgatgacgtattgatcgccctcaaaataggttttagttttctgagttgttcctagaactttagcaagctctttggcaacacttggtttttccgtgataactagttttttttgcatttaaaattcctcttacttcaattgatcaaaatagtaactgactaatagtataacgcatgttgagaaggaacaacccagaaatcgcgaaagtatcataaataataatatttcaacagccaaaataaaagattctaagaaactgaattcttagaatattcttttttattttaaatttaatttagtcattatttgttcataaaccttatcaactcctactccgcttaataatggcactccattgattactttatcttttacattatcaggtacaatagttgtgctaacaaatccatcataattatcaatttgattaacatattctgctatgttccctttatatgtttgtacttgactaagtacaccttctttttctaaatattccttaatcttaccctctgctattgttgatgttgcaataccactaccacaaacaatcattaattttttcattgcgtttcactccttattttttaattatttagaaagcgcattatctctcaatgaaatattaaaattactgattaaatcttaatagttgataaatatttgctatactacaattatttatcaattaggaggtattattttgtccccaaatcaagccttttttctcaccgttattggttgcctgttagctatcagttcatcttattttatcgtgcgtctcaatatgctaaagccaacactcaagcaaaatttcttggaccaatatcctgacacggatgaccaagcttacaaagcgcaacaatcaatgaaacaagcttatttcaacgcatccttttacaagcaagctgttcctttaacatcttggttagtccttttattctttttatcaatcggtggctgtctaacagcgctctatctagatgccctgaacattgcaatccgtcttttggggagtgcattcatttttatcgcgtttctctaccttaagttgccgacttttcaagcacagcatactttttggaaatcttatctacaagcgcatcctgaaaatgaattaaaagtcgtcatactcccactcgattcacccattcaacagcggcggattgccttactcaccaaatttaaatgttgtactcttgtagcaggtctcatattgttttacgcctctctttttctataactcaaaaagcggcaccaaccattttatggttggtgccgcttttttaattaacgaatttcaattgggttcgttggttggtctgattcacttaacttcggtaacattaattgtaagacgccatcttgatattgcgcatcgatttgatcccggttgacaccaggtaggtagaattgccggctaaagcgcccataatgccgttcgctttgaacgatattgccttgactgtcactatgatcagcgaaactatcacgtttagcactaatcttcaatgtattatcttgataatccacgtgaatatctttcttgtccagtcctggtaaatcaaccgctaattggtaatccttatcggtctctttaacatctgttttgagtaagttgtccgtttcaggcgacattgccaataattgctgaccgaaattcttgaaccaatcatctccaccaaaattatctagccaattttgacgaccattcattaattcgtttgccatctctaaaacttcctttcttaatctttacaactctattctagtccgttaatcatgaaatgcaagtaattagcattcgctgttgttgagtgccaatttttaaactagaccactgatttttcagctttttgatacccgcctaatatggttttgtgctatacttaaggttccaaaaatattcggaggtaggttcatatgaaaattgttgtcttagcgggcgggcgtagtaccgaacgtaacgtttcattgacgtctggacacaaaattaccaatgcattacaaacgaaaggccatgacgttgctttcgttgatcttttcttaggaaatgatttgcacgacgtcgcatcaatcgatgatctttattcttcaacacctgttgaaaaagattacgacatcagcgacgaagttttaacagacgacgccatcaacgcattacgtactgatggttcaacacaactctttggcccgaatgtcttagagatttgtaaaactgctgatattgtcttcctcgcacttcatggtggcgatggcgaagacggtaaagtccaagcggttctcgatctctttggaattccttataccggtagtgacacactcgcagcaggtattacaatgagtaaaaaggtttcaaaggaaatcttattatataaccaaattccaactgctcggtttgtcgctgcttatcgcgaccaacccatgccagaaatcccatttgagtaccctgtcgtggtaaaaccaagtaacggtggctcaagtgttgggacgcatatcgtgcacaacgaagctgagttacaaccagctgtcgaagatgcgcttcgtttcgaccgcgaagctttaatcgaagaattcattaaaggtcgcgaattctcacttggcgtgattaatggtcaaccattacctgccatcgaaatcgtcgttaatgacggttggtatgactttgagcacaaattcgtgactggaaataccactcaatttgtcacaccaccaaacgatttacctgatgatgtgcacgaagccatgaaacaaatggcacttgatgctatgcaagcacttggcttaacgaactacgcccgcatcgacttcttctggagtcctgaaaatggcttacacgtgatcgaaggaaatacattacctgggatgacgccactttcattaattccacaagaagcagaagtgcttggtatcagttatcctgatctttgcgaaatgattgttcaaggtaaattagaactccttaaagcaaaatagccaataaaaataaccctgtcgacgattttcagtcgacagggttatttttatttggttcatttaaaactgattacttcgttcctgattaggaactattcttaaaaaaacacgtcgattggaattcccaagcggtcatgtagtaattgaatttctttgacggtaaatggaatcttccctctaatcttacgattagccgtcgttaatgttttgcccaatacatcagcaacaacttgctgtttcaaatcatgaccctttaaataacctgatagaacaaataatttttctgccacattcagcacccccaagaaacgttatcaatcccgttccacattaggaatattacgataatgtaagaactctgtcaattaaaaactttagtcccaagtgttcacttattgacgtcatttgtcatataattaaacttataagtcaaacgcgtgataaaggacgatgctaaatgttcggacaattactacacgataagcgaactgctaagaatctaacaatgcaacagctcgccgatctactcagcgcaaaatataataccaagattagtagctcaatgatcttccggtgggaaaaaggcgctgccccatcactaaaagcattatttattgttgctatcgaattgcaaatcgatcttaaccaattggccacccttgttgcggatcctaaccgcatcaattagccgcttttttttgtttttttcccgatttttgaatggtcttcacacctagtacatctaaaaagaacgtaaagattggtaatccaacaattaacccccaagttcctaagaaacgttctgctacaaataaaacaacaaatgtaaagaaaattggcagctgtgttttactcgacataaatcgcggattcaaaacatatgcttctagggcatgaatgactaaaatcatcaccaatatataaaccacatactgaattccgccgattgaaaaggcgataatgcacaatgggatacatgaaacgatgactcctgcgaccggtaccatcgacaataggaaaatcatgatggctaaactcggaatattaggcattttcattaccgttaacgtaatcgttgttaacactgtattcacaattgcaatgaagatttgggcttcaattaccacgccaaaggtattcacgaattttttagcaaaatacatgatatcttggaagaaccagccgtaagtactcttcaaaaagagttttccaaactgcggtaatcggtctagctcaattgtgtaaaagaaactcaaaataaacgataagacaattgtgacgcccattgttccgattccggtgatgtaattaacgattgttgatacaccgtgtttcaactgatccgtcaagttgaactgtttcatgtaatccccaatggttcgcataaattgattcgcatcaaatgatggactttggtagaaattatagacactctcgcctaatttaattgactgtttagcaatctgtggcacataaatcgttactgctagatacactaaaaaaatcaccaatatataaagcggcacaaccacagctgcgggcggaatttttgaatactgttggacctttcgtactaattgagtcactaaaaaagtaaagatgaacgtcagcaaaatgatattcatcatcgagcgtgacacatagatgaccccaatcaacgttaagagcactacaactcgtcttaactgctgattcgtcacaaatttttgatataaactcacgcaactttcctcctatggcaattctatatcattattttacaacacttcgaactaattggatattctggaattccgatagttgcgacttacatctttttaaaaatagtcgtatactactctggtacttcaaatttacacctagaaaggattttcggtatgttagaaaaaactttttataagaaactactacaacactcttttgatttccctgttactatcaactattgggacggcagctccgaaacctatggttctggagagcctgaagtagcgattacttttaaaaaagcgattcccatcaaacaattgtccagcaacgcatcattagccctcggcgaagcgtacatggctggcgaccttgaagtgacaagtaatacaacagataccccacttcaaaaactattaacggcggcttacactagcgcagacagtttcatgcgtaatagtcgctacattcatctgattccaaaacaatcgcattcagaaaaggcaagtaaaaaagatatccaaagtcattacgatttagggaatgacttctaccaactttggttggataaaacaatgacttactcatgtgcttattttgaaaaaccaactgatgatttagagacagcacaaattaataaagtgcaccatattttacgcaagctcaatccacaacctaaccgaacattgctcgacatcggctgtggttggggcaccctcatgttaaccgccgctaaagaatatcatctcaaagtggtcgggattaccttgagtcaggaacaatatgatttcgttcaacaacggattaatgacgagggccttagcgatgttgctagcgtccaacttgttgactatcgcgaactcaaacacgccccattcgattacattaccagtgttgggatgtttgaacacgttggtgaagaaaatcttggtgcctacttccaagatatcgctgactacctcactgatgatggggttgccctccttcatgggattacccgtcaacaaggcggtgcgcgcaatgcctggattaataagtatattttcccaggtggctatgtacccggtttagttgaaaatacacaacacattatcaatgccggactacaaattgccgacatggaacccctccggcgccattatcaaaaaacgctggaaatctggactgctaattttaacgcccaaaaagacgtcattttaccaaaagcaggtccagaattcgtccgcatgtgggatctctatctccaagcatgtgcctcatcgtttgaatctgggaacattgatgtcattcaatacctcgtatcaaaaggccccagcgcaagagacctcccaatgacaagagaatatatgtatgattagagtgctgactgtcgcgcttagtcattgagcattaattcaaaaataacataaatccaggttttaggatttatgttatttttagattaagcggaaattactgcgacaggaagcacgtttagagtgctgagtcgaacgggttggctttgaggattaacaaaaaacgggtattatggcgatttttcagccataatgcccgtttttaggttaaccggaaaaggcagctcgaggaagcacgtttcaaatcaaagtacctgattctgcgggaaagatatggcagatgaaacccgttttcgttagcgtgctgactcaaacgggttggctttgaggattacccaaaaaagacccgctaaatcaactttgcaaaagataacctaattttttcgccaccgcttaatactgcaacctttttatcaaaatcctcaatcgtaaacagtaaattcattaatactgtataaacagtatgattttcttgtacactgtcagacaagacagactccagtaaagttttatctggctgcaaattttcaaactcttggtacagataaccaatttttaatttcggtacagcatagatcccttcatacttatttctgattaaagaaaaaagagtagatttaccacttccattatcccccaatacagcaactttttgtttgtttcggatttcaaaagaggcatgattaaaaatcaaatgattatcatatccaaaagttacttcttcaccacgaattaatattttatttttcgggggatttgttagctcaaaattaattcgaatatttgcctgttcttcgacttgttcttttacatctaactgctctattcgtgattgcacggcttttgcttgctttgctattgctttttgtcgccctccaaaagacttgtaagtagatatgaaacttctagctctaatttcagaattactcatattccttggcttatctgttatcgcttcagcttgcctttttttctgcaaataagcttcctctagttgctttttctttgcttgataattttcatattctcttttctcagtgtgaatttgatgttccttctgctgtttatatgcagtataattcccgtcaaaacagttaatggtattgttgtcaatctcaataattcgattacacaattcatctaataaatttgtatcgtggctaataatcatcattgtgttatattttcctaaatttcgctttagcaattgaatccctttagtatctaaattcgctgttggttcatctagtaaaagtattgaactactcttagaaaaagtctcagctaaacgtaaacgagttttttccccaccactgaaccaaccttcagatattgttgagctggagcgaaattctttcaattgccaagaatctactgattcgtggtattgaccgaattgtttataataagagatatctcccttaacctcaacatttcccttgtcaggagctatatcattgttaatgatctccaacaacgtcgtttttccacttccgtttaacccgactacaccaataatatcgttcttaaaaacagttaatttatcaaaagtaaaaagaagcttgcctccaaaatatttttctattcctctcatttttatcaattccatacaatcgcctccctttctagcgattaagttaataaacatattaaatcattaattagtttttgtagtttagagagtttatttcttagggtttctattcctcaattattccgtatccttctggtgcaggaatcccatgttccgaagaacgactgactgattcccactctttccatgtaaatatacgtttttctgcattttcaacagctaaatcatatacaaggcttcccagaactaatcggagaggcggattctcactattaaccagtttcattatagcttcggcggctaacttaggatcactatccaccgattcgtttgaatattgttgggccaacttttcacgtaatgaatcatactcttttttctgtgtagtaaaactcatttttaagtatagattcgtccagtaacctccaggttctacgatagatacttttataccaaaatgtgcagcttcttgtgctaaagcctcgctaaatccttctaaagcaaatttactagcgctatagattcccgacattggaccactaatcagtccaccaatactagatatctggataatatgacctgattcttgtgcccgcaagtacggcataacagcttgacttacccatactgtaccgaagaaattagtttccatttggcttctaacttcatcttcactaaattcttcaatcattcccattaccatattccctgcattgttaatgacaatatcgagtcttccaaaatgtttaatggcagtttccactgtagtcgaaacagcacttctatcagtaacatcaagacttaaaggaagtaacattccttcaaactggcattttaactcattcagtttttcaatatttctagcaacaccaacaaccttctctcctgactccaatgctttttttgtgaattcgtatcctagtccactgcttgcacctgtaataaaccacacacgtgtattttcattgttattaaatgtcataaataatctcctccattaatcatgtaatattggtatcattcaataccaatttaaaacaaacaaaataaagagcacaggcaatctgcctatgctctaaatatagaaatataaaatttcaacaggattaatccgattgttggtatcacaaataagccatcaaattcattgatgtacccttttctacgaagtgtcatgggagatctccctttaaaataaaaaagaggaagattcctctccccctttttactataaccgtataataaaggtttcctataagaagacagatttatcctaatactctgagcataagcagagcctttgaacgtattaaactaacggttcaaagttaggatatcaatcattaagaagcctccattcatcataagttagttcaagtataacatatgggcctgatttgtcaaatatcaatctgtactctttcactaacctgccacgttagtgtaagtacatttgttcacaatcccaattgaatcatctaggaataggtgattactttcctcaacaatctggtcttttctggaataacaccgacggtgttattaatcaaaatttattttaaaacctacactaagctgaagatattacataacttctatataaaattaagaaaaccatcataaaaatatacaaaaaagctaaaacaacttgccatataatttttgaacttgatcttttaattgcttattctcttcttctaatgccttaatacgagtttttaaggtctttactaatacatcctcagatcggatacttttactttgtttacggggtattaattcactaatctgctgtcctcttaatctttctattctagtcctaatgtcttcttgtttataaagccatgactttgaaacatttgctttttgtgcaaccgtattaaaattaattttctcattttttagtgccatttctgaaatagccttttcaactctaattcttgttttttccgatttctcttttgatagtttaattatggcagttgtgttattttttcgtgtcatcctaattagtctccttcaacgagtgaataatctgttctagcctgtttttaacacgttcattagtttcaacctgacgctgccattggttctgtttagctctatctaataactgtttagtacgttctaagtgttcttcatgttcatttagaaactgtttgcttgtacagaaatttgtacaatctaaacaagcatttgcgtgaggacaaggtccggcaattaccggtaaacggcaataaccattaggaagtgcttgtgcattgatattctttttaaaccattgaagatctgtattatcaacttcactctcttcttcatttatttctagaatgctaccgttgtttgtcactaaggtttccttgaatttcgcaaattctttctttagggtctcatcaaaaatatacgcatatctcgctgtcatttccggggattcatgacctaagaatttttgcacaatatgctgaggtaccccattgtttatcattctagtaccaactgtatgccgaaaagcatgagcatgaaatcgaaaaatttctcccttgttatccgttattttttctttataagctaattcatttaatttaactctaaaggtatcctgcttcaatggagagccatcttttcgtggaaatacatattcacattcattttccatttcatcagccactctttgctcttgaactagtattaatgctgcaatctctttagaaatagggatgatatgttcttttttcattttccactgataatatttcagaaaacaatccccttctttgtctgttataacacttcctttttttaatgtacaaagctcactgatacgcattccacactcttgtaataccataaccattgtggctatataaggttccaatttatctaatttctcgtttaattgttcaagcacatgttcatcaatataacgcggttgtgccttcggcactttaggataatcttctcggaaaattagtgttttagaaggagaatcttcccagtcaaatcttgtaatggtagagaaaaaaacttctaaattagatattcttccagttacggttctagggcttaaacccattaaattaatttcaattaaataaggttcaacttcttttctagttaattgctttatccttcgtatgttcttatcatttttgttaataaaattgaagaattctcttagtctcgacgctacatcacttacgtgggaaaaactatgtgtatttaacattaacttacaataacgcttagatacttctttaaaataatcattttcaaagcccttaaaattgattatatattcgtaagatgttggatttactttatcttccggtaatgaaagatttcttcgattccaaacatctttatcccactcttctccatcgaaatagaaatcctcatagaattccataaactgtttaagattagtaacataataagagttcgcaagaacaggaattttctgttgattaatatcaagtttataatttgtaattgttgttcttactccctgttctgttaaataagttcgatattccatcaaagctttttctatgggaacttcagttatagacataatgccagggtattttaaatttaaaaaacctaacattcggcttatcaccgttccttttctaatccaaacagattttgcattccaagttccattatttaagtgaacataataaaagtattttaattcagttcttaaccatatattttcaactttatcgaaattcacccatcgatttcttaatgttggatttttacttaactcaaccgcactaggatgtggacagattcttatatcccatctatcagctgcccaaaacccttttaacacactattcatatctgctattttttcactaatggctgtactagtaatgagcttccgattagttgctacgcttggtaatttcattagtatgttctctcccttgtagatactttttatattcatttttcatatcttgatcggaaagatgaacatatgtatcaattgttgtttgtacatgtgcatggcctaatctcttctgtacataagctgcatcccaaccacttctaatcagctcagtggcgtgtgtatgacgtaacatatgggcagtgaaagtaatccctgtccgttttactaagcgccttataaggtccaatacgctttgatactttaggggatgaccaaaataagtatttttaagattaataaatatagcattttattcatccacaaatgttatagaattaaggcaatcaagtaagtgttttaatcctaataaaaatagtgggtacaataaaatgacgatttattatttaaaaccagaaaaaacagtcgatgaaattatcaatacattgcacgctagtgttgctagcatgcaatattttgaaacgctagatatgatttgcgaaaaagttgagtttaatcttgatgaagctgcgctattacaacgaattaagcaactagccgatgattaacgcgcagatttggaagcccttcattcaatcggggtttcagaaaatgatatcgaccgtttaaaagctgcaggtttattattattcgttcaggataatgagattccacaaagctatgtgacgctcagtcggaaagcattagttggtttgcaagagattgcagcggcttatgctcaagagtctacacagctaacaatgaatattgattcaaaagaaattcaaagcttaaaagcagcttcagataaggttttcagaaagtatcaataagaaattgaaaaaagcccatcgacatttatgtcgatgggcttttttgtttgccgcaaagtagcgcttggctatgcttgaacgaactttttaacgggtcctaataggtctgggttgatttgtgcacgaatcaacgtgccatcttcttcatagctttgtttagtgatattggcacgatcactgaggtacgaaacagcttgcccttctgtgtatgggactaagaagtcgagcgttgggtattgttcaaagagttgtttgttaattaaggcaatcaatgcatcgattgctacttcgtcgcgagctgaataaacgatttggtttccgtctacttcaggatagcgcgtatctggtttcaaatcagctttattgtaagcctcgatgactgggatatctttaatgttgagtgattcaagggtttcttgtgtcgtttccatcatgtccaagtagtttggatctgagtaatcaaccacgtggattaaaagatcagcactcgctgcttcagctaaggttgatttaaaggcttgaattaagtgatgaggaagttttgtgacgaaaccaaccgtatcactcaacaggaatttctgttggttggggaggacgatttcgcggacactcgtgtctaaggtggcaaagagcatatccttttcaaaaacttgtttttcaggtgtatcggggttcaaccgttgtaaaattcgattcatagtcgttgatttacctgcattggtgtacccgacgagtgcgacaactggaatcgcatttttcgtccgttgacggcgttgtacgagttgttgttgatcgattttagcaagttcggctttgagcttcgtaatccgtttttcgatgagtcggcgatccaattcaagttgggtttcacccgccccacggttcgcagtacccccgccaccttgttgatccaacttgttttcagaaggatggaggcgtggtaattggtatttcgcttcggcgatggccacttggagttgcgcttcttttgttttggcacggctagcaaagatttcaagaattaattgcgtccgatcaagaatgcttattccgagttctttttctaaattccgaatctgtgaaggtgaaagttcatcgttaatcaagataatgtccgcatcttcagcgacggcgcgttctttaatttcttgaaccttccctttaccaaaataagtggcgtgattagcttggtcgatattttggcgaacgtcaccaacgacttttaagttatcggcacgggctagttcgcccagttcgcgcattgtatagtcaaaattaacttggcgttgactaacaccagtgattaaaacctttttaggttgcatataagtttcttccatgagatctcctttttgtgagagtgcgtcttcaaatggtcagccgttgaggattagcaatatctcgtaaatgagcggcaacgccgattgtttacgagatggcgctaaacgcagacggctatttgaagaaagcacgtttaagataagagtgcggcaccggcggttatctgctgaggattagcataggcagacgaaaaaccgatttgttggttatttggctgacgtagctaaccgagagcagatgcctggtggagcacgtttcaattgaaaaaaagggccatggcaaaaatattcttttgtcacagccctcagttaattaaatttaaaaagcgaatgccaacagaaatagccgcaaaatggccacatgattattcaattgtgattgcgattaaacaaacgttagttgacatgttgttgacgctcctttgatgtgaaatgggtggttacccaccttatccgttaagtgtaccatgaaagccattaaaaaccaaagttcgcctttagcgtgtacgccaataattaacactgttgtgggtgctcagcgtaattttatggtagaatgtaagcggttatcaaaatacataagagaatcgattgggggattgacgaatgaaaaatttagcattacttgatgttggtggcactacgattaaatatggtttatgggatggtgcggcgcaacaattgaccaaacaaggggctgttgccacaccaaagtcgttgaatgcgtattatgatgtgctgacgcagattgtggcggagtttaaggctagtgaccaagttgttggggtcgcaatgagtacgccgggtgcagtgaacaaggcgacgggtattattgaaggggccagtgcgctcccttatattcatcattttgaaattcaagatgaacttgaaacgcgctttgacttaccagtcgtaatggaaaatgatgcgaattgcgcggctttagccgaagtcggtagtggggctgctaaagggctaaaaaatgtgttgttcatggtaattggcactggcgttggtggttcagtgattgtcaacggacaagtccaacatggtcgccatttattcggtggtgagtttggctacatgatgatgaatgatggtcggattttaagtgaagtcgggactgccgttcacatggctgaccgttataatcaagaggcacatactaactactcagggcgtgaagtttttgaattggctgatcaaggcgatttactcgcgcaaaaggaggcacaggtgctctatgataatctcgcacaagccatctataatttacaatatagttttgattcagaagcggttattttaggtggtggggtgtcgcaggccgatttcttggtgccaaatattgaaaaagctttacaggaaatactcaagcaagtcgatattgcgcctttcatgccaaccattcggacgtgtcagtatcataatgatgcgaacttgattggtgcaatggaagatttccgccgcacatatccgaatttagttgcaaattagactagtaaagaccgctttcaacatgtcataataaatattataaatgatattaggaggcggttaagatgcccacggaaaaacaagcattaaatcaaacgattggatttaccgcggcattagccactgtgatgggaacggtcatcggcgctggtgtgttctttaaagcggatcctgtgacgcatgcgaccggctccaccgggctgacaatgcttgcatggcttgtcggcggcttaatcacaatttgtgctggattgacagctgctgaattagcagctgcgattccagaaactggcgggatgatgcggtacatcgaccatacttatggtagtttagcggcatttttattaggttgggccgaaacaacagtctactttccagcgaacattgcggcgttgtcgattgtttttgcaacgcaatgcattaacttattcagttggtcagctcactggcagattccaattgcaatcatcgtcggactcagcttaacaatcttgaatttctttggttcccgggttgggggactattccaatccttcacaaccgtctttaaattaatcccgcttgcgattattattgtgttcgggttaattcatccaggcagcaacgccgttcatgtgtcattatttgacgtgacccggtcaaatggatcggggagtttcctgtcagcgctgggcagtggtgttctagcaaccctctttgcgtatgatggctggattcacgttgggaatattgcgggtgaattgaagcatccggaacgcgatttgccgcggtcaattttaattggtttaacaggaaccatggttgtctacctcttagtgagcgccgtcttcgttcttgtgttgccaatcaatcagattgccggcaatccgaatgcggcttcagaagtggctcgagtgctatttggtggtgtgggtggtaaaatcatcactatggggattttaatttccgtctatggcgggattaacggctacacgatgactgggatgcggattccttatgcgatggcgctcgagaatcggttaccattcagtcgacaactgcgctccctttctaaaacaggcgcgccggttgtcagtggtttagttcaaattagtatcgccatcgttatgatgtttatgggtggcttcaatacattgactgatatgttggttgttgtcatctggattttctatattctaacgtttatcgctgtgttcattctgcgcaaacgtgaacctgacttaccgcggccataccgcacacttggttatccagtggttccagtcatcgccattcttggtgggattttcatcgtggtgaatacgttattcacccagacgatgttaactttaatcggaatcggaattacattactcggattgcccttttattactatttaaaaaataaatatccagtcgtttaacacaaaaaacgaagttcgtgaattaactgaacttcgttttttttgtggccaaaaaccaattgtagcaacggatagacgaaaaataaaatagttgcgcaaatgaattatcggcattaattgttgatttttataaaaataaactaggtcataactcatgagttgtgaccccttcgcatcaaaggttcttattggcgttttcagaaaattcgtaagtttatctacaaattaaaataatccgaaaaacatcgctcaaacattggttttaaaaggtttttaatgaatgattgacaattatcgtcgcgtgaaatatacttgcacataaccaaacaatgatataaactaaccttaactgctgcttaatcaagttgaaatgagccactattttgttttaaataaatgattgtcggcttttgactagccggtggtcatttattgcaacggttatacagaccgcggttaatgatgaaggaacacgccagaaattctctggcgtgtttttttatggcctaatttggacatgcgtcattgtttttgttataatgaaaccaccattgaggaggcactaacttatgcaagtattgattcttgttttaacttatctaatcgccgttgaacacatcggtatcatggggctggaaatgtttgccagtgctgaaacaaaggcgaaagcttttgacatgccgctggactttgtcaaactaccaaatacccgcgtggcactggccaaccaaggcatttataacggaatgttgggcgccgtaattatcatggtcaacctgttattagccggccaaacgctcaagattgtcctcgccctattaatgctctacatcttcatcgttgccctttacgggacatttaccgccaccaagaaaattttcttcttacaaggcttacccgctttaatcacattattgttaatcttattcttctaaaaaagagctttaatcatgacaaatccaattctcatcaccaccaccgaaactattcctggtaaaaaatatgaagtgctcggtgaagttttcggtttaaccactcaatccaagaacgtcttcaaaaacatcggcgcttcattgaaaaatgtcgtcggtggcgaaatcaaagcctatactgaaatgatgactgaatcacgcgatgtagccatcgaccggcttcgccaaaatgcacttgaaatgggcgcagatgcggttgtcatgatgcgctttgattccggttcaatcggaacagatatgcaatcagttgccgcttatggcacggctgttaaatatatcgactaacaaaaaaagatgaacggttccctgatattcaggaaatcattcatcttttttaatttacttattaattctaatcaacaacttaagccgctggtgctgcgggttgtgcgctatttaaagtccacgtaatgttgctcgagaatgtatcaccagccgcaagttgaatacttggattggcacttaatgctaatttcccagcaacttgccatgttttcgacatcttatccgtcataatcggtgtttcagtaccattatcagataatcctacgttcgttggcaagccagtcatattaatggctgtgctgcttaattgtttgcctgtggttgatgccattttactcatcttcgctgtcaatttccaacctggcgttgctctggtatccgtgattttcaacccatcactgacctgatattgcttgtcctgagcagttgtaccaacataaatatcttttgataagacgttcccaaatctaaagctaggcacttaatccaatgacaacttaccaactgctggttgcgcttgtaattcagcttcgttagaaacaatcgtaactttttttgaacttccacttgattcttccgttacgttagtcgttaatgttagctgtgctcgataactctttccagccgtagttgcagctgcagcatctttcatgaaagtactatctttactaaaggttagtggttgttccgtatttaagttcgctaaatttgtaatgtcacccttaagattagaaacaccactattagtagcgggggttattgtcttatcctcaccatctgtaaattgccattcataatgccaattactcgttgaaccagatgccttagctaggtctgataaaccatcaactgaccaagtcccaccgagattcgccgctttcttgtaggctgctaacccaccaacataaaccgttttctctttagagacattctttgcagcaattttatatttagctggaatccctggtctattcggatctttattcaattttccagtataatacgaatctggcttatacttttcaccctcaacatcaatcgcttcgttaactttattcacttatttcgtgcgtttaatagtaaaatgattaagcagttggtgcagttggtgttgttgatgaaagattccaattaattgttgttgtgaaactctcatctttagctaaatcggctgctggatttgctgctaatgttaacgtagctgcttccatcttgaaattatcgacaccatgtttcccgttacctttaaccacttcaacggcaggagaatcgtccttaacagcacctgttaaagtttcaccaagtgaaccagtagaatctaaattcaatattgcgcctgttagtttattagcatcatctgtgaattgagccatgtcagctgtcaacgaccagtcagatttgcctaaacgtatatcagcaatttctaaagcgccagctgttttagcaactttaccagtaaagccagcataaatctcactagcttcaattgttccaaagctgaaacttggtactgattttaatactaatgtcccattttcaggatctgttgggtttgttggatccttagcaacaacactaaagtcggcttttgatgtttgcggagcaactgcgtcagctgatactgaccccactgtcattgctgttggtgctaccattgttgctaatgctgaaaataattttgtcttcattgataattcctccaaattattattaattacatttaatatagtagcacgcaattcaattgccggataacaaaaaatagataccatacggtatctatttttacccttcactaattattcgttaaaccgattccaatcctgtcctagcagttatttccccattaccattcttctagtgtaaacagcttgcccggaatgcatgaccgcatcatccacgattgagactaagcgtgcttcacgggtaactgccggtgtccaattttcatcaattatctctaataaagactcgtcagtaacttcagccaggtaatcaagcgtcaattgcaatgcgtctgctaagtaaccaattaataatgctttatcgatgataatcactttggctgcttcttctggtgaatgcgaccaatcttgcgtttcatcgggtagatctaatgcaaatttttgtgaccaacctgcacgtatccacaatggttgtatccctttcaaatccgcaatctgataatccatttcacgggcagtatgccatactaaccaggtcaccgatttaattagtggctgcggcattgtattggcctcagccactgtcatttgttccaatgtatcgagtaatcgttcttgagcgcgttcgaccgttgcacttaatagttgcgttgcatgcatcttatcatcctccatatctaaaagttaaccccattgtatcattaaaccactactaggcctttttttatgaatttaccaaaccattacgaagctttacactttattttcactagaacaacaaacactttacattatttgtttatgcttaaccttgtaaagaataaaaaatcgttttacaagaagcaatcaatatgcgcatgagccaaacaatcatcccttacgtggcaacaacaactttattacttttggcagccggctgtaccccacaaaaaaatactaaacaatcgacagctcatcaatccacccttgtccctaaacaaaacatgagtcgccacattcaattagccggtgcgattaatactcgtgatctaggtggaattgtcacgaaaacaggtgccaaaattaaagccaatcggttaattcgttctggtgaattagctggtttaacaacgaaggataaacagaagttaaccgttggaaaacaattaaataacatcgttgatttacggactagtagcgaagttgcggctaaacccgatcccgctttaagcaacgtccactacaatcactatgatgtcaccaagtctttagggacttcggcaagtcaagctgactttttcaagaatctcgataaggttgatggtgaagttttcatgattgatattaaccaaaaattggttactgatcccgcagcacgcacgaactataaacagttctttaatgtcttattgaataataaaagtggtgcgacactttggcattgtacagccggtaaagatcgtgccggattcggtactatgttagtcctcagtgccctcggggttgatcaaaagagcatcatggacgactacctcgcctctaataaatatcgccgcgccgaaaatgaaaagacaattgaacaaattaaggtggcaactcacaataaccccaaagccgttaaaacgatcactgcaatgatggccgtccgtaaaccctatctacaggccgcatatgacacaatgaacaaaggatatggtggcgttaatggttatttgaaacacgggctgggtttgactaaggcggatctcaaccaattaaaaacgatgtatcttaccaagagttaatgcttcatcaggtagattcactattctcgtctctccatttttttggtatactgctccttagaatcaatcagttaaaggagcctcatcatgtcacctgctcaacatctcattttattattgatcgtgatcattgctgcaatcggcgtcttaagttcatcagtcatcttattcatcgcccaacaaaagaaaaatgaccaacttaagaagaaatcgaatgtgctcttttgggtcagcatcctcgtgatgatgatctttctgaaactaatcgatatgcttcaataaacaccaaaaagcatgccagtcaaatttgactagcatgctttttttgcaatctatcttctaaaaaaccacccttaattctttgctaagttacaaaacttggtctaagcaattttattgttccccacctttgaggatgttatcttaactactaaaggaggtgtcactatgaaaaccttagacaatatcgcgcttactttattaatcgttggtggtttgaactggctacttgtcggtctattcaaattcgacctagtcgctatgttatttggcggtcaagcagctattatttcgcgcatcgtatatgtccttgttggacttagcgcattatattgcattaagttatttgcacccatcaacagcgcgcagcatgaatagctttctggagcggctttttatagggaccaaacatcctgctcgtctcaatcgctatccattaacgtgttggtaaaactgttatttcttttcaataacgcaaaaaagcgtgctagtcagcctcgactagcacgcttttatttttttatttggtagattgtaaaattaatccgacgctgttcggacaaaaaagatcagcttcccttaaaatggtgtttaccacaaacccatcttttaggagctgatcttttttatcgtatgtttagctcatattattaagttttaaatggctagtgacaataatgttagatagcaaaaaccacgataaaaggaatttatcgtggttctgagcttatttagcaatttggcttgtgccatctgcgtaatttaatgtaacgccgtcttggacgttaaaaatgtaagtgttaaattgaatgctgttatccccgacggattggccttccatttgaacgccgcgggctagcagctcattatcgttaaaaataggtgtgacacggtaacgaacaaaacgattagggtgttttttgagataataagcaatatctgattcatgggccagcatttcgggtgcgtttagctggcgtgttcctgtcatcagattctttggattattattttcaccggttagttgatagccaattaaatgactccggttatacagccagccagatttaatccgcttattatgccaaccggtcggattccaagtgagtccttcacgcttggcagtaggcatcatcgattgatttaaaagaacatttgcagcaccaacgcgatttagtgcgtcgagattactaaaggtttgccaaccaccgtgatcggtagccaaatcagtagcactgaagcttggttggttattattgacgagtacctcgttttcaccacggtaggtgaggaccgcgagctctgatgtgttatgacgctcaggactagtcgtttgcatttgttgctgatagttagtgagttttttgtttaactggttaattttacgttgaagcgcattaatttgacgttcggtttttttgttgtgcgcattaatgcgcttggtttcttgacgtaaggtggtagcgtgaacggtagttggttgttgcaaaagggttccgacaccagcaagtgaaattgttaccaccacgcgacttatcaaacgggttgctttcattggctaatcctcccatccgcaaagggtatagccttctgcttgtgcttgtgacaatggcatggttgtagtactgttggcacgacttaagccacggcaattgggatcaagatggtattttttaccagaattaggggcaattgtcaccatttgttcaacttgttgagcactaacagcttgttgtgcttgttggcttgcctgaattgcagcctgttgctgagcggcctcgctagcttgactagtagcggcgattgaggctgaagccgcacggactctttctgactcagacgctttttgctgctttttaacaagtcgtgattgactggcaacttgttttgtcagttggctagcctctgttttctttgtagctagttgtttttttaaagcgctcgagttagcacgggccgccttgttttcgcgtacatcaacttgatgttggctggtcttcttggaattcgcagcagccaccggcattaatgaaccgcctaagccgattaaggcgatgatgataatcagtacgcgacgccattttctgggtcgttgccggttaaagaatagtagtgaaatcagtgcgctccccaagaacgctaaaaataaataggacataataacctccaaagtaatgaataacagttcttaacgattgtatattgtacataatatgaaagcaattataaaaagcctaggcgtacctaggcttttagcggttaatctttggttgtgagtgaaacaattgcttttgtttgatagtatttttcaggattggtttcaaaagttaaccaatctgcatcagcgaatagaccagccaatgcaagaattgggcgttctttagcgagttgttgttcgctagaagttgcaatggcgtcttggtagctaccattgaagatttcatctagataaaaggcttgatcatcaccaacgtttaaataggtagtatcattcttccaagcatgtagcaaatccgtttccgaaaaagtaacggtttcgttatttgaaaaagtcatgataaattgcatatgggtcaactccaatcaattaattaagcaacaatctatttggttgcctgcctaaattatagcatttagataataaaaggcgaaccttttgacagtcattgtgattaaaaagtagaatgaaggtgaacaaaatagaaaggaagtcattgatatggcaaacgaagaacgattagatagtttgaaaaatgtaattgaaggcacagttaagaaggttgtcagtgaagtgacacctaataaagataagaaagaaaaggcgcaaaaagctgacaaaaaataggacttagtaatgaagtaaaggtcaaaatcatccgtttggttttggcttttttattggaaagccgttaaatgcgttcgcttttacgaggcaggcttggtataatttaaaggatagtcagaggaagtaggtacaattaatggattacgcagaaatgttagaccggcaaaagcacattcgtaatttttcgatcatcgcgcatattgatcatggtaaatcaacattagctgatcggattctcgagatgacggatactattgccaagcgcgatatgcaagcgcaagtcttagatgacatggaattagaacgtgaacgtgggattaccatcaagttaaacgcggtggaattacactaccatgccaaagatggcgaaacttatattttccatttaatcgatacacctggacacgtcgatttttcatacgaagtgtcacgaagtttggcagcttgcgaaggcgccttattagtcgtcgatgcggcccaaggggttgaagcacaaacgttagccaacgtttatttagcggtcgacgatgatttagaaatcgtccctgtcattaataaaatcgatttaccatctgcacaaccagacgttgttaaagcagaaatcgaagagatgattggtttggatgcttcagaagccgtgcttgctagtgctaagagcgggattgggattgaagaaatcctagaaaaactggtaacggacgtgccagcaccaacgggtgatttaaaagcaccattgaaggcgctgatttttgattcgatctacgatagttatcggggtgttgtgttaaacgtgcgggtttttgatggcactgttaaagtcggcgataagattcgcttgatgaataacgggaaagaattcgaagtcactgaagtcggtgtgatgtcgcctaaagccgttaaacgcgacttcttaatggttggtgatgtgggttatattacggccagcatcaagaccattcaagatacgcgggttggggatacggtcacccttgctgacaatccggcagcagaagcccttgatggttatcggcatattcaaccaatggtttattctgggatgtatcccgtggataacgcgaagtttaacgacttgcgtgaagcccttgaaaaattacaattaaatgatgccgcgttggaattcgaacctgaatcgtcacaagcattgggctttgggttccgttgtggcttcttaggcctcttgcatatggatgtcgtacaagaacggcttgaacgggaattcaatcttgacctgatcatgaccgcaccatcagtggattatcatgtcgatttaaccgacggcacagaagaagtgattgataacccatcagaaatgccagaaacatcaaatatttcagaagttaaagaaccgtacgttaaagcatctatcatggtaccgaacgattatgtgggggctgtgatggaacttgcacaacgtaaacgcggcgaattcgtcacgatggattacttagatacctatcgggttaatgtcatctacaacatgccactgtctgaaatcattttcgatttcttcgatgacttgaagtccaataccaagggttatgcctcattcgattatgaagtgactggctatcgtgcgagtgatctggtgaagatggatattctattgaacggtgaatccgttgatgccttgagttttatcgtgcaccgtgactttgcctttgaacgaggcaaagcgattgttggtaagttgaaagaaaccattccacgtcaacaattcgaagtgccgattcaagcagctatcgggaataaagtgattgcccgttcaacagtcaaggcctaccggaaaaacgtgctcgccaagtgttatggtggggatattacccggaagcgtaagttgttagaaaaacaaaaagccggtaagaaacggatgaaatccgtgggttcggtggaagtcccacaagaggcgttcatgtccattttgaagatgaatgatgaagataaaaccggtaaataaggattcttaaaaatttaatagtgataaaatagcagttttgccaacattttgccaacgtcaattttcgttggttggcaaaactgctatttttttgtgtttcgaattattcaagatagtgctcttgccaacattactcgttctgaatttgttcgatcagactaactgtatttttgcgcattttatgagtgacatgagaataagtgtccattgtagtgctgattcgagaatggcctaaacgttcactaacgactttcattttttctccggcttctagcagcatagtagcgtgagtgtgacgtagtgaatggaaattaaaattcatatgcaatttgtcttggactaattgcgccttatatttaatcgagttaggaaggacgggggtaccattttcttcggtgcacacaaagttactgcttttctttttgttctgcatctaccttttttaatttatcagctgtttcttcaacttgtgcttcaactttttggcgttcttctggtagtgatgcgaatttatcgaataaaccggttaaatcggtcttgttagtgacttttaagcccatcgtaatccctcttttctaatttgcatctatcataccagataataacggtttcgccaatgattcactttttataaataaatattgcataattatttaattggttgtatgatagtcctaatcagaggaggagataatatgacgattaaaaaattactcactttcgttgggttaccattcatggtaatgttaacgtttttcatgattcagcagcagcccgttttggcagctggacagacagttagccaagtgcaagctaaaaaaacgttggttttggggaccagccccgattatgcaccttatgaatttttagtgaataaaaacggtaagaacaagattgtcggtatggatattcaagtcgcacagaagctagctgatgatttaggcgttaagttagtggtgaagtcgatggactttgatgcgttattggttggtttggaaaccggtaaagtcgatatggttatttcggcgatgtcaccaacggatgaacgaagcaagagtgttgatttttctgatgtttattatctcggtggtcaatcaatcttagtcaataaagctgatgcgaagatttaccactccaaaaatagttttaacgggaaaaaaatgggggtccaaacggggagtctccaacaaacactcgctaaaaagcaaattaaagatgcgcagattacgggcttggccaaagtcccagatctcgtccttgcattaaagagtcataaaatcgacgggattgtggcggaagaaccagtcgcaaccgcctatgcaagtaatgatccagaactcgttcagattaatgggaaatttgatttaggcgcagacatgcaaggatcagcgattgcctttccaaaggattcgccaaccttagtcgctgctgctaataagagtatcgggcaaattaaaaagcaaaaattaattccgcaatacttaaagaacgcgggccaactcatgaaggtcaatacgcacaacactagcatgtggcactattgggcatacttcgctaaagggattggctacacattattcattacgattgtttcaattgcagttgggattttaattggggtcctcctagcctttgggcgtttggccaagaataagttggtgcgtgcgctggcagtcatgtatatcgaatttgttcggggcacaccgttgatgattcaaatcatgtttgtctacttcgggattggcttatgggtcaacattccagcacttttggcaggggtaattgccgtttccttaaatagtgcggcgtatgttgctgaaattatccgttcagggatcaatgcgatcgatgctgggcaaactgaagcttcaagaagtttaggcttgtcacaacgcgatacaatgcgttacattgttttaccacaagccctgaagaatatctggcctgctttagggaacgaattcatttctttaatcaaggaaagttcaatcgtttccattatcggggtcactgatttaatttatcaactcaaagtggttcaatcagcaacttataaaggcgttgcaccgatttttgttgcgatggtgatctactttatcatgacctttagtctctcgaaacttttgaactatgtggaaaggaagatgcaacatgcttaagattaatcaattggttaaaaaatatggggacaacctcgtgttaaatggtgttagtggtgaagtccaagctggtcaagtgattgttgtcatcggcccttccggtgggggtaagagtacgttattgcggtgcttgaaccgtttagaggacccaacgagtggccaagttctgtttgaaggcaccaatttgatgacgttatctgaaaaacagcttgatcagattcggacaaagatggggatggttttccaaaactttaaccttttccccaatttaactgtcctcgataacttaacgttagcgccacaaaaagtgaagaaagaatcagcggccgaaacaacggctaaagcaaaagcgttgcttgaacgcgttggtttagcggataaggcggatgcttatagtgatcaactctctggtgggcagaaacaacggattgcaattgcgcgggcattagcgatgtcacccgacgtattgttatttgatgaaccgacatctgcgctcgatccagaaatggtcggcgaagtcctcaaggtaatgcaagacttagcacaagaagggatgacaatggttgttgtcacccacgaaatggggtttgcgcgcgaagtggcggatgaagtctggttcatggcagatagtcaaattgttgaaaaaggggaccccgaagccatttttgaccatccgcaagaagaacggacgcaacaatttttagccaaggtcctagcacaatagttgcaatttagccaaaaacacgtaaaatagaaagacgaacacttgttttgaattaaaggagtggtgtttttggcaagcgaacacattgaacataaattagcactcttacccgcattacctggttgttatatcatgaaggatatcaatgccaagattatctatgtgggtaaagcaaaaaatcttaaaaaccgcgtgcgctcgtatttcaagagtagtcacgaaggaaaaacggccaaattggtctctgaaattgtcgattttgaaacaatcatcacatcgacaaataaagaggcctttttgttggaaattacgttaatccagaaacaccaaccttactttaatattaaacttaagcggggcacaggctacccctacattaaaattacgaatgaacgcgatccgcgcctactgatcacgggggatgtcaaaaaagatggcggcttttattttggcccttatccggacgtgtatgccgcccaagaaacattgcgattcttacaacgggtttatcctttacgacgctgtcagggacatcaagggcggccctgtttgtattatcatatgggtcaatgtttgggcgcgtgtttcaaagaagtgcctgagagtgtctatgcggcccaaatcaaggagattaaacgtttcttgaatgggcaagttgatccggttaaaaaagaactgacggccaagatgactacggctgctgaagagatgcagtttgaacgcgccgcagaattgcgcgatcagctccactacattgaagccaccgttgaaaagcagaaaattatttctaacgataataccccgcgcgatttatttgccttttatttggataagggctggttatcgattcaaatcttcttcatccgccaagcacggttgattcggcgtgaaaagcggctcttcccgtgtgtcagcacacctgaagaagaattggcaacctttattttacaatggtacaaccgcaagaataatgtgttaccccgcgaaattctggttccagaaggggtcgaaaagaaagtcctcaccgaaattttgaatgtgccgattcgcacgccgcaacgtggtgagaaaaaagctttgatggaaatggcgcagaaaaatagtcggcttgtgttggaagagaagttccgtttattggaactcgacaaccgcaagaccgttggggcgcaagatgagattatggacgcgcttggcttaccacatggccacgtcattgaagcatttgatcattcgcatattcaagggactgatcctgtctcagcgatggtcacgtttgttgatggtcgtgccgagaagaaactctatcgcaagtataagttaacgcaaacgacagatcgtgcaggcgccaacgaagatgccaatacgcgggaagtcattttccggcggtattcgcgattgctcaaagaggataaaccactgcctgatttgattttaatggatggtggaattgtggagctcaatgcggctaaagacgtcttagagaacgaattagggctatcaattcccgttgcagggatggtcaaggataatcatcacaaaaccgcctcgttgttatatggggaagttgatcaaaccattcagttggatccaaagagccaaggcttctacttgttaacgcgaattcaagacgaagtgcatcgctttgccatcagtttccaccgccaattacgcgggaagaattcgttgagttctaaactcgatgacatcaagggggttggtcctaagacgcggacgaaactcttgaagaattttggttcgatgaaacatatcaaagaagcttcagtggcggaactcgaagcactcgggattcctaagactgtggcgcaaacgattaaattatcactttaaaagcctaggtcagacaactattatttgtctgacctaggcttttttagggtgctaatggttggttaacggttttttttacccacttagtagccaatatgaatatggttttatgaatatacaatactacaaaactctatctataaacagacaaaactctatctataaactcctgtattccttgggagagtaaggctcaagaggggtctaaaagagatttaaaagaggtttataaaagaggtatataagaggcaccactgtacgagatacaaacctaaaacaaaaaaacacaaaggagtgagccaaaaaacggctcacattaaactccagtcgcacagctccttgcgcctcacgctgttcgttgcttaaaaggtgtggcaagccacattaattcgggcgctgacgccccgaaccccgtccaagctgagccagcttgactgctttttcactcgccgttaggcaggaaagcaaagttttgtagaaactttggctttcgccatttcagtgtaaagactggttaagagctgtcaattccttatgctcccacgctttgctcgtccgctaccattgacagcaaacagttagtttttctgaatcttaacaagaattcaactgctatgttcgtttttaagggccttatttttcgtttttagcggttttgagactgtttatatataatttataccaaagcaaaaacaaaaagccctcaacaggctcttagagggctaaataacgaagccaggacgattaataatagcttcttatctttttttcaaaatataagaagctgtctagtatctgctgctggcgattaatctgacagtgctgctagcctgcggcgccggttacgtcctggcaggcgaccacccccacaagcagtcgtgcgctgaacgctagtcgtaacagcgtcagtaaccttttaccgcaatcagcggcgtcttcgcgctcctgcgcaggcgccgctgtttcgagttcaaatcaccgctctttctctacttcgccttcctcctcaatagcaaagggtcccccgcttatagttcatctccttgctcagttttgcatttagcacgagtattgttcacagtttagcgactagaaaacgtgcacgttgcccacgccaccggcggcccaggccaaatcttttgacagcaacattaggtatcctttaaactagcaataaaaggtaactaattcaaaaaattcggttgggcggtgctcaagaaagctttctcggggaggaaagcgattcttgggtgcggccttttcttattggaggaaacttatgaccccttacaacgaacacaaagcagatgtcctaaagcgcttggccaccagccggcaaagcggcctcaccagtgaagaagcacaggcccggctcacccagcatggccccaacgccttggccgccagcaagcccctaccagcctggcgccagtttttggccaccttgaaagaacctttggtgattattttattcatcgccgtgctattggcctgggccagcgccggctatgacttcttcgtgcgccacgaccccagccatggtatggcggcagtgtatgaaagcattgcgattctgctgctgattttcgttaatgccggcctctccttctggcaagccaaaagcgcacaaaaatccctggacgccctgaaggtgatggcggatcaccacgccaaggtcctgcgcgatggcgactggctgacggtgccagccaccgagctggtgcctggcgatattgtcagtgtcaaaaccggcgacttcatcgaagccgacgttcgctggctccatgtcgccgagctgcaaaccaacgaagcccacctcaccggcgaagcggaacctgtgcaaaaacaaactcacgcattgggcgctgacgtgcaaatcggtgaccgcaccaacatgggcttttctggtgcgacagtgacgcatggtaacggactcggggtggtggttgcgaccggcatgcaaaccgagctgggcaaaatcgccaccttgctggatcaagtcaaggacaaaaagaccccgattgaacgcaccattgcgcgcctgaccaccaaactgatgatggtggcgatgatgattgtggcgttcacgttgctggtggagctcttgaaagcctatcagcaaactggcagtctctccttcgctgcgctggccgaatccctctctacggcgattgccttggcggtggccgcgattcccgatgcgctaccggcggtgctgtcaattgtgctcacggtcggggccacgatgctggccaaaaacaacggtctgatcaagtccctgaacagtgtggaaaccctaggggccaccagctacattgcctcagataaaactggtaccttgaccaaaaatgaaatgactgtcacccggttttatgccaatggcgccagttatgtggtggaaggcgacggctatgaaccagtaggcgaaatcatccctgatgacgaagccgacacccccggcttttcgcgcttcatgatggccgctgtcctgaataacgaagcagcgattcaaaccgacgacgaaggccgcagccgcccgtatggcaaccccaccgacgtagcgctggtagtgatgggccacaaatttggtatcgatcgcgatacgattttgagcaaagaccaggcgcaggacatcgacatcattcgcgaactgccgtttgacagcgaccgtaaaatgatgagtgtcgtcattaaagatggcgaccagtatcaggtgctgactaaaggtgcgccagacgtgattttagccaaaactgatgccattctggaccacgaccaactcgtaacattgccagctggtcaaactgcggtagaagcgcaggtcaaccgctttgccgaacaggcgctgcggacgctggcggtgacgctgcgtggcatcgacgaggacctggcgttgcatggtagcaccgctgagcttgagcagcacctgaccttactaggcattgccggcatcattgacccgccgcggccggaagtgcgccaaagtgtgaccaccttgcaccaagccggtattcaggtcgtgatgatcaccggcgatcacgcagtcaccgcccgcgcgattgccttaaagctgggcattgtcaccgaccctagcgcccgggtagtggaaggcaagcagctggaagccatgaccgatgaagatttgttccggctcgcgccaagcatccgcgtatacgcccgggtgtcgccggaacacaagcagcgcatcgtgcgcgccttgcagcggcatggcgaaaccgtggccatgactggtgatggcatcaatgacgcgccagccttacgcgctgctgacattggcattgccatgggcattaatggcaccgaagtcaccaaagacgccgcagatctgattttactggatgataaattcaccaccatcgagcgcagtgtccgcgccggccgcaccatttttggcaatatcaaaaactttatgcggcatgagttaaccaccaatgtcgccgaggtgttggcgctgctgttcggcgtgctactgatgacgcaacccgtcggccaagtggcggccaccaccccaacattaacggcgctgatggtgctgtgggtgaacatgatttccgatgctttaccgagctttgccctcggctatgatgtgccagaagccgacctcatgaaccagccgccgcgcaatgtgaaacaatccattttgcatggcatgctcgggcgcatcttcctgcgcggtattgtgatgggtgggctcgtgtatgtcgccttcatctgggctgccagtcaaggcatgagcggcgcagaagcgcaaaccctcgcctttttgaccctggtgtttggccagctgtggcatgtgttcgacgcgcgtagcacccgcactttgttcgcccgcaacccgtttgaaaactatcagttgctgctggcagtggctttcgcggcggtggcttcattacttgtcaccatcatgccgttcttcaacgaagtgatggggaccgcgccactttctagcacgctgtatgctgcggtagtcttcatcccggcgctaccgaccctcattttgtctggaatcaaagaactgtggctgcgttggcatcgcccgccggtagccccagagcatgattaaagattgttttttcgggccagattgcctacaatcggggtaaccatatcgaggtgagccagttgaatgtttatcaacaaaccctttcaggataaattgccgttaattagtatatcaaaatataatatgtaactaggtagattgtaaaatgatcatgatgtatacacagtcagggtgtcattcttgtatgacatctcgtcgatggtttaataaacacggaatcagattccaagaaaaaaactttagtaaacaccctccaaaactataaataaagaaaatagggtccctattttcttttaataccgtatttcacacggtatcgaataaaggtcgtccgtttaatacctgtatttcgggacacatcaatgtcactcatgccagctcgataaagcttaaaagcatgttgcaaacggggatcatctttggcatattggggtttgcgcccatgatatttcccctgctgtttggccaggaaaatcccctgttgttgacgctcaataatccgcttccgttcactttcggcctgatacttatacagttcaatgattaagttagtcatcagttgacgcaagttaggatccgcaatccccgtcatggacggcaaattcaacacatctagggtggcacctttgttctgaatggtgttcataatcttagttaagtcctggttgtttcggcccaagcggtctaattcagtaaccaggacaatatcgccttcacggatataggccagcattttttgcagttcaggtcgcttggtgttagccccacttaatttatccgtaaataatttatcaacgtcttttaaagccgctaactgtcgatctaaatgttgctccttggaactcacatgcgcataaccgattttagccatttccaattctccttttggacagtcctaatgaacacttttaatgcctagtatagcacagaaacaaaaaaggccaatagggtataccctagtggccgtttttgatccattgtcaatggctttttaaattagggcctagtacttttggaatggaaatactttccaacaccaaaaattctagacccgattatttttgttaaacgagatttctatatataatggaattataaatttactgttggaggtttttatgactgatttatttgcagatgggactatctctatccatggagctcaagaaaataacttaaaggatgtcagtttagatattcctaagcataaaacgactgtatttgctggtctttctgggtctggtaaatcctctttagtttttgatacattagccgctgtttcccgacgtgaattgaatgaaacttttcctagtttcacccaacaatatttgcctaaatacggtcaacctgaagtgaaccgaatcgacaacttaccagtggcaattgtggttgaacagaagtctattggtcgtaattctcgatctactctggcaacctacaccggcatctattccgtcttacgtttgatgttttctcgaattggacagccttgggttgggtattctgaatggttttcctttaacctacctcagggaatgtgtccaaaatgtcagggattaggctttgttgacgacatagatgaacgtcaattaattgatcctaataaatcactcaatgaaggtgcaatgacttttgccggttttcaaccgggaacttggcgttggaaggaatatggcaacagtggattatttgatttagacaaaaaaattaaagactacaccgatgaagaatatgatttattcatgcacgctccgcaacaaaaattaaaaaatccaccggcaaattggggccgtacggcattatatgaaggactagttccacgtatgcttcgctctgttattcatagtgcctcaggtcgtcatcatgaagctgccttatcaaagattgtcactcgaaaaccttgcccagtatgtcatggaacacgtctgaacaaaaaggctctaactggtaaaattgctggcaaaaatattgcagaagtcagcgatatggatttagtaagtgtcctaaaatttttggataatatctcggaccccaaggctaaaacaatggtgcgtgaactacatagtaaagttcaagctttggtcgacatcggtttaggttatctttcccttggccgtggaactgatactctatctggtggagaagctcaacgaattaaaattgccaaatatttgacgagttccctatccgatttagtttacgtactcgatgaaccaagtgtaggactccatcctcacgatattaaattaattacccaatccttaaaaaagctcaaggaacatggcaataccattatcctagttgatcacaaccctgccattatttcgacagcagattatgtcgtggaaatgggaccacaagccggcaaaaatggtggtcaagtaactttcactggtacctacgacgaactattacggtcagatacgattacgggtaaaatgttacgagaaaaaatcactttcccaaagcctcgtgaacctcaatcttggctaaatgttaatcatgtaacttctcataatttaaaagacgtatctaccagaatccctcaaggtgtaatgaccgtgatatctggaccagcaggttctggaaaaagtactttagtccaagctttcaaacaacaagtttctgatcaagactatattgatttgagtcaggattctgtaggtttgaatattcgttctacacctgcaacttacttgaacattttaaatcctctacgaaagcttttcagtaaagccaacaatggcgtttcaacacaactatttagttataacggtaaaggtgcttgtccccgttgcaaaggtaaaggtgtgatgatcaccgagatggcattcatggatccaatcgttcaagaatgtgagttgtgtcatggaaaacgttatagccaagaagcactacaatacacttatcatggcaaagatatttctgaggttctaaatctttctatcaacgacactttagagtttttcaaagatgtgccagatatctacaaaaaggttagtctactccaccaagttggacttggttatttgaatcttagccagtcgatgaccactttatctggtggtgaagtgcaacgtgttaagttagcaatggaattgaatcataccggccgaatctatttcttagatgaaccaacaaccggattgcacttacaggatactcaacaattgatcgatttatttgaaggattggttgataagggcaatacattaattctgattgaacataatctgaaattaatttcacgagccgattggttagtcgatatgggacccgatgctggtaaattcggcggtcaagtttgttttgaaggtcatccaaaagatagcctaaacgataaaaactctcggactggtgctgcattagcagctataatttcttaaaagattcaaaaagatcacctcaagttaaacgaagtttctcagttgagtttaaagttgatgtgataaactactatcaaactcatgatgaaactttagccgaagtatccgcaaaatttgatgttaattcttgtcaaatcagtctttggaggacagccttcaatcagtatggtatagaagccttgagcctcatccgaaaggcagaaaaaccaaagtgaaacataataagaagaaattacgtaagttagtaaacaagaacgaaatcgatcaacttcgtgaagaattgacgaaaaagaatcaagaattatatgatgcaaaatttgctcttatggtagattgtctacttttgtctagttatatttaacaccaaaggctactaccacgggtttaaagctaattcacgtaggtttacattggataaaccaataatggcttgtcctattcaattactaatccataaactagcctgcgaaattttgcgcaacctacttataaacaagcaactcttgattattatagctttcggcaaaagctaataacgccctactggaagtggtactaaaatagtatccactaatacattatcaccttgtttatcatatatggagcttgctgtctgggtaagcaaatctttatgactttcaaaaaagtctaaatcatcaaaaggagctcttattttaagataggtgcaaagcgtattccaatcccttttgtatcctttataataagtaaactcgttagtctcatctaaagttacctctgatattttcattttagaaacaatctcgttacctccttcataataatttgaagagctctttctttctaatgttttaattaaaagagatttaaattgatcatttgtaaacatattcatggatcctttcataacaaaatatatacttcctattttatcatgaaaaatatctgttaagcaccaatgattcggttaaataagtttaataacacatctttcacgccagctgcattgaacacaagtccgacggcgattaaagcaataatcaaaaagccaataagttttgaaaattctcgtttaaaacctaaaaacagtccaatgacgacaatcgctaacaataccaatgactgtgcattatccaagaaccagttgtacaaattctgcccaaaattcatgtgattgtcctcctttccttaagatatttttctcgatagtagatatagctttttacacgctttaataattgaaaaggagttaaatgctctccataaacagttattcgactggtataattcttataaaagctcactttgtaaaaatcataggtatagatggtatcaccagcttgccgttttccctcaataatgagagacgtatatttccctgtattttgtatatacgcttgaaaccctaacttctttaattcttctgttaagaggctcatgtaatcaaatcctccatgcctagatgttgttgttcaattaatttctcatgtttttctgtcagtttggcttcatgaatcatggtggaaataatggttgtaccgttgagaatatctaaaatgcttgcgacttttaatgtaggggcgacttgatgatgtaaccagttcaatgttcgttcaaaagaataaggttctggctgtatggttaggcgtaatgctccacgatttttgccgataaaccattcccagcgttcattggtttgccaatcactccgtcgcttggtttcgtccttatcggcaaagcgaatataacgattgataatctcaaacgctgttttttctgcattttgatgttccaacaaatctttcatggcttgagtggctctgtcgtttttcaaacgaatttcaaagcgattctttatttctgcgtcttctaaggcaatatcatttttcacgtattgctcataatctttctcatatatacagaaatagacttcgctttttaatgagccaatataaagggtgtttcccatgtctggtttttcatcacggtgaaccaattcaccactgcgataatttttaaagctccgaaagacggaaatacattcttcctgtttacatttctttgccaattctggaatattcaaaatccctgttttatcgttgatggctaaatccaagcgtttgaaaatacctttatgttccatgcaatcttgaaagaaaccataccagctccgatgttgagccaatagaaagttttcaaattgccgacagccttttcctttcagttctaataaaacccctttacttacatcatgagagactaggacaacaatatcaccgaaacgatagtgttcgggataagaataatagccaaagtcttcgtgtagcatataatccatattcaagcgtaaaacctcaccgataatttgagacacatcattggtagggaatcgaatccgtacatagtcgaataacatctccaatgggttatcgggattgaagcgttccaaagcgttcagtaaatcttctttcacctgttgagtagggactgccttgcctgtttcaatatccgataggtaaggtctggtaatatgagaagcaaccgccagtttattttgagaaacgccataagccagtcgcttttctttcaattccttaatccaaattttttcgttttccattcgcaaacctccaatctaaaaaagatgtaaactatgacccttgagtttacatctttcctattttccgcaattccttgtaccatcaacattggttgatgagaattgcctgttttcagttgtatttgtgcccccctgttaggtagagggggctaaaggattggcgtggctaacgccacaccaatcaaagcaagtctgaacctgtacctttcacttcgtgcggtacaggctcagattgctttttttgaatgacttttcctatttctcctaagaaatcatacctttttggtacaaggggtgtataaaactcactaatcacactttttcctgtatccacataacctcttcccttgatgggttttaagaaaaattgtttttgtgtatcgcttccaaacatcataccgaagcccatttcagacatacgacccaaagccacacggaagttaaagttatctcgaataccatcactaaaatattttgcgtctggacgctgacaggcaagaattaaaaagaagcctgcttgtcgtccgagcataacaatttgtttgagtttattcataacttgtgcactatcacgacctaacatatccatcatcgccacatattcatcaaaaatcaggaagttcgcaggtagaccaagatacgcataattttctcctgttttgtagttcgggtgttgcttcatggtttcactacgggcaatcatatcgtcgtaaaattgactaatacatgccagcatatcgtctttacggtaatagacattatctatgaccgctcctaagtctgccaaatcagcatttttagggtcgagaatataaagcttcgcatttgtatgcaggagagattcaatcaatgtgagaataaaataggattttccactacccgtgcccccagcaattaacatgtgagggagagaatcaaactcccaatagaccgattccatcaatttgacacgtccatcttgagctaccacatcttcaatgccaattcgattgccaatggtgtcataaagtagaacatactctacataagaatctttcaacgttttttccactaattcacaatacaagcctgtttctagtttgttttctaagtgcaagagctgatcttgatatttccctaaagtgatttctacatgaatatggatcagtccatctttcattcggtaatacattttaggaaaatggcggattcgttgtttggttttcttgctggataagtctttaaagaatccctctgattgagtttcttcggcttcataccaatggttttctaaaatcatacgagctaacttttgacggtgctctaactgttttatagaatctatgcgatagtgataatagagccagctgatgagtccgcatacaaaaaaagcagtgagaatactgctccaaaagtatggcgtatgcagttgatagaaaaatgtatctaactgaactgaaactttgttctttgaaaactggataataagtaatatattagttttaaaagccgagaaaacattgcgttttaaagagttttttaatagaaatatgaattagttcatatcgctaaactcaaataataaccctttaccgtaggtaaagttaggttaagttataaagggcgcacggtggatgccttggcactaggagccgatgaaggacggtactaacaccgatatgcttcggggagctgtaagtaagctttgatccggagatttccgaatgggggaacccaatacctttagtcgggtattatcattaagtgaatacatagcttaatgaaggtagacgcggggaactgaaacatctaagtacctgcaggaagagaaagaaaaatcgattccctaagtagcggcgagcgaacggggaagagcccaaaccaagaagcttgcttcttggggttgtaggacagaacattggagttaccaagttaagttgtaatcgaatcagctgggaagctgagtcaaagagtgtgataaccacgtagattaaacaacttaacctccgttctggatcctgagtacggcggaacacgtgaaattccgtcggaatccgggaggaccatctcccaaggctaaatactccctagtgaccgatagtgaaccagtaccgtgagggaaaggtgaaaagcaccccggaaggggagtgaaatagatcctgaaaccgtgtgcctacaattagtcaaagctcgttaatgagtgatggcgtgccttttgtagaatgaaccggcgagttacgtttatatgcgaggttaaagtgaaaagctggagccgtagcgaaagcgagtctgaaatgggcgagtgagtatatagatgtagacccgaaaccaagtgacctacccatgtccaggttgaaggtgtggtaaaacacactggaggaccgaacccacgtcagttgaaaatggcggggatgaggtgtgggtagcggtgaaattccaatcgaacttggagatagctggttctctccgaaatagctttagggctagcctcggaatattggatcatggaggtagagcactgtttggactaggggcccgtcatgggttactgaattcagataaactccgaataccattgatttagttccgggagtcagactgcgagtgataagatccgtagtcgaaagggaaacagcccagatcaccagttaaggtcccaaaatttatgttaagtggaaaaggatgtggcggtgcacagacaactaggatgttggctcagaagcagccaccatttaaagagtgcgtaatagctcactagtcgagtgccgctgcgccgaaaatgtaccggggctaaacataataccgaaactgtgggtggacacgtaagtgtccgcggtaggagagcgttctaagggcgatgaagctagatcgtaaggactagtggagcgcttagaagtgagaatgccggcatgagtagcgaaagatcagtgagaatctgatccaccgtatgactaaggtttcctggggaaggctcgtcctcccagggttagtcgggacctaaggcgaggccgaaaggcgtagtcgatggccaacaggttgagattcctgtactagtttattttgtttgaacgatggagggacgcaggaagctaaggaatgcacacgactggaaatgtgtgtctaagcaacaagtcttgagttgagtgaaatgcttgattctttaaggacaagttgtgatggggagcgaaattaagtagcgaagttcctgatgttacactgccaagaaaagcttctagtgagaaataaactacccgtaccgtaaaccgacacaggtggtcgaggagaatatcctaaggtgagcgagtgaactctcgttaaggaactcggcaaaatgaccccgtaacttcgggagaaggggtgctgaccgtcaggtcagccgcagtgaataggcccaaacaactgtttatcaaaaacacaggtctctgcaaaatcgaaagatgacgtataggggctgacgcctgcccggtgctggaaggttaagaggatgagttagcgtaagcgaagcccagaattgaagccccagtaaacggcggccgtaactataacggtcctaaggtagcgaaattccttgtcgggtaagttccgacccgcacgaaaggcgtaatgatttgggcactgtctcaacgagagactcggtgaaattataatacccgtgaagatgcgggttacccgcgacaggacggaaagaccccatggagctttactgtagcttgatattgagtgtttgtacagttagtacaggataggtaggagccgtagaaatcggaacgctagtttcgatggaggcgttggtgggatactaccctaactgtatgaccactctaacccgcgccacttagcgtggcgggagacagtgtcaggtgggcagtttgactggggcggtcgcctcctaaagtgtaacggaggcgctcaaaggttctctcagaatggttggaaatcattcgtagagtgtaaaggtataagagagcttgactgtgagattgacaaatcgagcagggacgaaagtcggacttagtgatccggtggttccgtatggaagggccatcgctcaacggataaaagctaccctggggataacaggcttatctcccccaagagtccacatcgacggggaggtttggcacctcgatgtcggctcatcgcatcctggggctgtagtcggtcccaagggttgggctgttcgcccattaaagcggtacgcgagctgggttcagaacgtcgtgagacagttcggtccctatccgtcgcgggcgcaggaaatttgagaggagctgtccttagtacgagaggaccgggatggacatacctctggtgtaccagttgtgccgccaggcgcatcgctgggtagctatgtatggacgggataaacgctgaaagcatctaagtgtgaagcccccctcgagatgagatttcccattcctttatggaagtaagacccctgaaagatgatcaggtagataggctaggagtggaagtacagcgatgtatggagcggactagtactaatcggtcgaggacttaaccaaaggtgcaatgttaggcttttgaaatgaaatattacttattatgcagttttgagagaacgaagttcttctcagtgcgcaagcacaaaatagtgtggtggcgatagcaagaaggatacacctgttcccatgtcgaacacagaagttaagcttcttagcgccgaagcatcaattagatgttgacggcttttttattttggttaaattcagactaaagtggcaggaatgttaagttttaaaaatgtcaatgtggatagtaacccgggaagaaatccgagcgtctgtggataagtctgtggattgtgggtataacacggttaaaaggtctttttagttatccacaaaaaaattaacaggcggtggataacttttttaaaattattataacaccagaataacgctgatataaaaggatttgtaaccggataatttgagaacgaacaatcaaaaaagggtggataacttttttattaaatttaacgaaaaaatttaggtgtcggttatttagtatcaagaaaaattcgagataccatatttgggacgaacacttgtgcatatgtggacaacttttgtggataagcagtactttccggtgaattactgtgaatagctttttttctgcattgttttcccctaaaatgtaagtaacagtaggaggctatttatgaatattaaagtaatcacagttggtaaattaaaggaaaagtatttaaaagcggggatcgcggaatatgcgaaacggctcagtaagttctgtaagttcgaaatgattgaagtcgcggatgaaaaagcgcccgaatcattaagtgacgctgaaatgactaacgtcaaagacaaagaaggcgaacgaattctcaacaagattaaagataaggaacatgtgattgtcctggcgattcaaggcaaacaacgtgcctcagaagaattcgcaaaggaaattcaagatttggcgacctatggtaaatcagatatcacatttgtcatcggcgggtcactcgggactagcgatgcggttaacaaacgcgccaatgatgcactttcatttggcaagctcacactaccccaccaattgatgcgcttagtattgacagaacagatttaccgggcgtttatgattaatcaaggaagtccgtatcacaaatagagataggcataaaaggcctcattgttgaatgaggctttttatatgcaacaagagagagcagcttgcaacaaaacaaatagtcatcgaattaagcgagatcttctgctatctttaggtttgtagaggaggcgagttaatgaaaattatatttaattgggattcaaagtgtgcacaagatacgattgtcgttcacagtcaaccacagaatcaagcaacggttgaatctgcttttaagaagctaacctttgatcaatcgattcaggtgcgagatgcgcgaacaggtcgattacaaaacagatcattaacggcaattgaaagttttacggcctttggacatttggcgaaggtggcgacaatcgatggcaatagctattactaccctagtaatttaaaataattagccccgttttcgcagaacggttttctgagaattaataacacaacgattttaaatctgcagcaagttgccaattttgcggtgggttcaaatgcgcgattggtggtctatacgcaatctggaagacagtatattgttagtcggtattatgccaagcaaataaaggagtggttaaaatgatgaagcaaatccgcaaagactttaatcaagtggcattaatggcgattatgtggctcactgttgtcacaacgctaacgcggggcgaagcgctggctgcttggcgattagttagcctaggcgtgttgattggcattgtgtttggcgtcatttattcatacttatggcgctattcgacgttcggtgcgccgtggaatgttttgattagtactattagtaatattgggtttcaaatactcgctttgaggctctattcgacaacgttatttgatgttgtttcaccgtatttattagggacgtcgttattaacattcgtaatgcacgtgattattttttattactacacgcgctatcaaaataagcgcttagtgaacgaattgaatcaaaatagaaaataaacttgttgtcccctttgcaggttgtttatactagaggaactaggactatttgttaagtagaaatgaggggaatcagatgacgaagagacaacggaaacgactttggctagcaagcggtgtgattttactaggattagtgattcttctaattggatggcaacaccagaccgccgtttttgctttcttggatcaatggcaaaattaccgccaatatgtgcttgagattcgtcatctggggccgtatgctttcttggtgtttggtctgttaatgattggggtcaccttaattccgggtgcgccaacatcagcggtggcattgattattggcgcgtgtttgggtcattggggtggtttcgtggtcaatgcgattggcttgacgatcgggaacttgttgcaagtccaattatttgcccgtgtcagaaatcatcgcagtaaaaagccggattcgcgtgtttaccgcgcattaattaagatgcaacatccagcgcttggtgtattaattggctatgcagtgccgatgattcctacggcctttgtcaacttggcggctggagacacccacctcaccccccgagcacagggcctggcgtgctttgggggttcaacgattgtcgcgtttatctacgcctttgcgggcgatttgcttattttgaagcaagattggaagagtttattgattctcttgatagtcgctgttgtgattggtttaacggaatatggtatccggatgcggcggagtgataaagctcgccaaaaagtcgaacagtttgacgcattaaattaaagttagaggacgtcctgaggagggcgtcttttttatttgtgtgaaaatgtatatgataaggtatgatattaaaagtgattgatatactgaagtaagctcgttaaacgaaataacttatactataataaatataaaagaaaaagtacatggggcacgcaatcgtgagcaagaaaaatacacttttaagaaatataacactcatttttatgactctttcttctcaaaaagaatgctacaaatcgtaataatactacataaaaacagagccaatgctcttatgctagatttacggacagattttcttctgccctgtaaactaatagcataggagcattttttaatatgattcgatacaaaaaagaatttaagcagtctcttgttgagatgcacaatcaaggccgttcatataccgatctatccgctgaatacggaccttcggtcgactcaatccgtaactgggtcaagttgtacgcggtccacgaagtggacggcgaaaaatggacgcaagctgatgtaaacgcattacaaaaggaaaacgacaaacttcgcgaagaacttgagattttaaaacgagccgcggtgttactttcgaagtacaactaacgcaaaatcgcgagttaggactggaaatcattgatcgttcgctcgcaatgggacaccgcataacaagcgttttatcagctttgaatatagctcgaagcacttattatcaatggaaaaattggcatcccagccaacaagagacgcgtcgcaacgctctaaaaacggcaatcaaagccgtctacaacaccaatcgtgggatctatggctaccgacgcatcgccgcatttttgcggttcattttgaacactgaagttggtgatcgtttggtttggaagctcatgaatgagatgagccttatatctcgcatggtcaggaagtcatataagaagccgacgacgaccactgacacaccacaaaagcccaatctcatgaagaatttggatgatttaagtggcgttctaacgactgacatcacgtacatccagctgatgaatagaaactgggtttacctggcgacggtctatgacccagaaaaacgccgtgttgtctcatatggactgagttcagagatgaccaaagaattcgcaacatctgttgtcgtgaaagctctaagagccaacggtaaaccaaagatgattcacagcgacatgggaagccagtacacttcaagtctgttcgaaggaacgttgcaaaacgctgggatagatcattcttactcgcgtaaggggcatccttacgacaacgcacgtatcgagagctttcattcgctcatcaagcgtgagctgatttatcacgaagaatacagaaccattgatgatgtcaggtcatctgtcgaatggtatgtgaactggtacaacaacgaacgtattaattcacgcactgaatggcttcaagccgcctagaccaatgtctggtttacttgatctcggttatcggcactaaccggcacgacgccgttttaagctgaaatccgggttttgaaaaattttcggagtccggaacctctcggtgccgaaaaaacctgtccataatcttgacatcagcgcccaatctgttttatatgaattacttcaaataatagagtttaccctccttggtaataatctctatgtctttgtttaatacttcatcgggatacgccgtttctaatcttttgttgaaagtttgtgagataattttttcctctatattttcgtctaaaggtttatattccaagtctttattaaatagcccctgcgctttacctagagcgccttcaaatccatattttttaattcgatgattatctatgtctattcctaaatattttgtttggttatcatgccataactttaattttgctaaactgtcatttgattgattcatatatccattgaacattgaatagcatatttcggctttaatagctcctctattcaatgaatacgttaacttgctgatttcttccaataaagagacaagtactttttgataggtaactaatttgttgaactcatttatcttctctgaatatgttttaaagtcaatttgtttattatgtgtggaaagatcgtcaatcgtaatattaacttgttgcagaagttgcgttacttcgccttctatggaatctaatgaatttaacattctatttcttaactcatcattttctaaaatatcagaactaaatttacttattttacctactctagtgattagtgaaaatatttttgatttaaactctctttgttgaaaatctcctatttcactgatgcttttattcatggtttgcagtttgtcatttacttcagacatatagtactgaccaacaactaaagaggcaacattcataacacttgcaacaccattagctactttagatgctttacttaatttagaggggttgactttaacaagatttgcttgaccagcaataccttttccattggaataaaatccgcgaacagcaccttccaaattttttgattttgataaggttgcaccacttggtataatgactcgatatacctcaccaacagactgcaaacctttattcgtaatagttctagctactgtgttagttaaagctggtacgacctcacttattcttgctataacatttgaatccttaatttcataaagctttctttcatcaattgttctttcagaaattagatctaatgtgataggaatttcaaatggtttgtcatcttccaccgtaagactaggtgaaatcgatatattttgttgttcatcgttattgcaattcatattttttaattttgatttttttagtacaagatatattatgataattacaaataatataaaagtaaaaaacaaaaaacttttcattaaacatccctcaattcacttggtatctaaatcattatacccttttaaatggctcctatgtcaagaatccggatataaaagtacgaacaaatttgactttcaatttaaattaaagtatcgttggaagcttgcactgccaaatcattcatccggctcaagatactatgagtttcactcaaagctccttcagctgtttggatcaaagaaataccatcttgggcattacgtttagcttgcttcaagccaccgatctgtgctttcattttttctgaaatagccaaacctgcagcgtcgtcgccagctttgttgattcgtttacctgatgaaagttttgccaaagagttactctttgatgcattggctgcagataaacgtgaatatgtgttcaatgcagctacgttagtattaattctcattgtttgttcccccgaatattttgtattttgttgcttacaaatatatatatcggttcagttttaaattgtttaagtcattttagaaacttttttagaaaaacgagttttaatctcagatacccattttcagcgaaaaaaagagccacatcttttatgatgtgactccgttcttgctatgaaatcaattggttctataatatttggtactgatagataaaaacttctatcagtaccaattttgttttatgataaaaaaatagagatgaagtccgcacttcatctccgaaaaacaatccctacactgaaaggaatgtcctacatggagaattgtacactagatcttctcggaattaaagactcacgtttgcggtttgatcccaaatataaaaatgaggcaacaacttatgatttttacaaacaccaaaaagtgcgttttattcatctgctgcaatcttattcttgttcttgccccgtttgttgcaaaaaaatgaaacgtaacggctttaaaaccgttaaaatgattggcttaccttcaggtggtctgaccaatattttctcgatccgtaaacaaaaatatctatgcccgagttcaggtacatgtcctcaaactatcacaaaattagcggagatcaaggatgtcagagccaacaatcaaatctcacaagccgttaaataccaagcagtttctaaattaggtcagaatatctcacaaaaagacattgccgctgacttcggcatttctggcatgaccgtgatgcgctttgcgcaagaagtctctacttacttagaaccaaattatcattatttgccgcaaaatatcgcttttgatgattttaaatcaggcaatttttctgcaagcggcatgagtatcattgttatggatattgcgactcaccgcactttagacattgtcaggtcacggcagaatacatatttgcgcagctattttctgcaatatgaccgtcaagctcgttgggctgttcagactgttacagttgatctttatgcgccataccgttcttttattcatgaaacttttcccaatgcgatcattattgccgaccgtttccacgtcataactcaggcctatcgtgccttgaatcaagttcggatccaagctatgaaacaaggcggacacggttcacacgtttcccgtgctctgaaacattattggaagctcttgaccaaagacgccgcgcgtctcgattttaaacactatcacaaaagcagaaattttcgaaacagccagttgtgtgaacaagatatcgtggcacgtttattagacatgtctgccgacttgcgtttagcttacaattactatcaaacacttttacaagccatgcatcaagcgaatccagaactgttagaggaactgacccaatcagctgcgggaatgcctgcacccattaagcagaccaaccggactttacgtaagcatctgcaggagatcaaaaacagttttgaaagtgccttttccaatggaccagtcgaagggaccaataacaaaataaaaaccattaagaaaactgcctatggcttcagaaactttgcgaatttccgtctgcgtgttctagtggaattaaagaatagttacgtgagtttgaactttaataatcagataaaaaaagccgcccgttccattcaggaacaagcagcttaaacaagctagaccaattacttttcaattttaataatttatttcatcagtaccacttgataaagaaccaatcaatttaataccagtgattcttgacccaatgtttctgtgcgttagtccagctgccgtatctttgttggacatattgagccgcaactttttcttgattggcaggtgaaaaatcaccatgcaaataattttgatccagctgatatttgccaatatagcgtccatttcgagcattatagttattgctcgactcatgctgaataatataatcacgtgcacttttttctgccccagccaatgttggctctaaactgttgctagaactggcagaagcgttctcatcaaggtcaacattcgctagtgacgctactgttccagcatcattgaccatagaggtcggttgcgcagccgcacttatttgtgctcttccaggaatagttaagttctgtccggctagaataaaatccggatcgtttaactggttagcctgagcaacagcttgtgtagtggtgtgatatttctctgccaactcagagacagtatcgccctttttgattttgatcgtttgttgtgctgtttctaaagcattcgaaaactcagctgcttgctgcgaattagtcgcctgtgttgcggcttgcatcgacccattattatgaacttgcaggtcattattaactaaattcatttttaaaacccgtttccttctttaattactatcacgattcctaattatatagtgttttaaaatattttacagtatctttttaatatcgatcgaattaatttgcttttcccagcaattatattgaatataatctaactatttcagccaatattaatactacaatcaaaaacaacaaggatagaatatgtgaattagcaattagcgaaacacctaacgcaagcaaaagtattccaactttttgacgtttccatatcttaacaattccccacgccaccaatggaaacattgtatagccaagtagttctcctaaagcaaatctcttatatgaaagtactaggtgataattattaaataaatataaaactgcaattgaagacttgatccacaagttattggtgaattccccgataaatccaaaaatatttgcagaagcacaaatgttaaataacaaagcgaatataaatacttttaatctaagttttatcggtaataatagcggccaaataaaaagatacaaggaaaagaaaggatacattgaattgactcccaatccctgtgccgaaaattctaaaaaattaacttctacaggcagctgatacgcctttaatgatcccagtaaacttcttattctagcaaaatgaaacgtccaatcctcaccctcactacctctaactactcctctagtaagaaaaaaaggaagtactaccaatatactaattcctaaaagagccataatctctcttagtctttttcgatcaatccattttaatcttattctgctctctgtgttcattacctattccctactaactcttttttctagttgctgtttaattccaaaaaggatcaacattaaagctgtcacgcttgttattaagaaaccttctttaataccttttggaatatatcttagttttatactgctctttcctgattcaactggtacttgcataaatccatgattatcctcaagtaacacggatttcccgttcacagttgctttccaacttttatcaaacggaatcgaaaaaaagacaggctctttatgtttagcattcacttgtaattcaatactattctcactcttttttataacctttggagcttcttttcgtaacttttcaatattctccgttagggcatctccattaagtagtataaatttaggagattctgcgatatttacatttccttttaagcgcattttaacaaatgcattacttttgtgattggaactcttataaagactcaatacaccttcattatgaaaattaggataattatttcgtataatctggttagttttaaaatctaatttaccataagaattaacaccatcaattacagctatcttagtcagaagttctgaattagctggcatatcaatccgatactcaatataagcattcttaccatatgggctcaactgaatgccattatttttttgctctatttttacgttatgaacagtaaaatttggattatctattgttcgaatgattgcacttcttttatttttattaaaaaagagaagctgccgctgtagttcatttccttcgagtggttgattaatggttagattgtcattaataattgcgatcggtaaagcatttttattctgatacacttcatagtttccactattgaacaccttctggtatccaatagaagtcatagaatcattcatcaatgctattctatattttagccctaataaactatccacaatcgtatttccttcttgatatgccagtgatttattccccaaagtagtactatatccaaattgagataacgttgtagctaattgctgatatccaaaagtgttaaaccaactaaacccgttaaaattattgtacattccttggtttagcattgcatttggcgttactacagttcgatagaatgttcggtcctgctttaaataagataaagcagtctttaaattttgactgtcattttctttccaatttttttcggtagcgacgtatccgggtaagctatccaactgactaataacaaaatgcatattttgaatactatctgtcataataagggctaacgttaaccacttgattatatttattcctatatttttatagaaaatatagccaatcaatatcattaaagtaagcaaccctaacattacactattgataattagtatcccgttatctattacctgctttttatacaacgttaacaatattatgctgcataatagcaccgcatataccaatggttttagtacattttctaagccgatattaatcacaaaaccagtgattaatatcatcattaaactgattaaaaaactaaatctgaatccataccctgtgggttgttgaaatccgtgccacattacatatggatattcataaatataactaattaagaaacaaatctctaaagcgctcactatcacttttattcttatttttattttgggtataaaataaaaagctattacagcaactaacatcaggataccgcaatatatattagcgccatcaaataattgcgtattatggctaaacagatcagacaatgctatccagatactctgcttgcgttgcaagaatccaacttgcaagggtattttgggtcccgatttcaatgcataattaattggtaaaattagccacgctgataacccaaaactaagtattaccgaaattagaaacttaatgccagatttccatttcactctattttgaaggactattaattctactaagaaattattaatgcagaagtttaattggaaagaagctcggtatatttgtattgcagcggctttgacaatcccgatgtatgcagttactatttataattttttagtgttaagtatgcataatcgatacttagcacctaatatttcggcacctctaaatgaatcttctatctttccgcaaacatatattgtggacttaaagcatacacttcatccattagcgcttacggatttaaatgcaagaacatggaatatagggaccctttttctaatattggcctttattgcaattatttatctaattgtaagaagaaaagataacgacggttattatgcatttgtaggaattatcggactcttactagtgattggtggattcgattttgtgaattgggattttacagaacaccttaaaatatttgagcctattaaagtaattcaatttttgggtagattattaatgttagcggctatattcttagtggtaccggttatgcgtatgatgattaaagtcaaggcgttgtgggcgaaatggctaataggtgttccaataataatctttctaattaatggtatgatgacaatttatagaactcagaatttttatcaggagatagtgccgactaatattttagaaagtgggtataataatcagctgcatactattgattattttccggctttttctggaccaaaaagcggtgtggactatgcggttaaagctgcgtatagtgatattaaaggaccgattatgtttggaaattcagtgccatcctttaatagtgcaacatatcatatgaggatcaaacacgtagttatgaataaatatttagtgacgccagtagcggcctataatagatttaactatcgggtgacaattgatggacagacagtaaaatggattcataaccaaacatacggaacaatcgcaattagttctaacgaattagtaaataaaaaaaaggctaagctttgtgttgttgcaaaaccattgaaaaatgagtggttagtaatgatcattgcgggcatagcaaatatggctgttatgttgaggttgattttggattttaaacggaaataggtacaacactgactagtgtcatgcaataataataagatggatactatgagtttaggaatcatggtattgaggccaaaaaagttggaggatttcacatggagaaaataactaaaaaaaaggaaatatgggcgattattttaattgttattttattaatagcgctaaatttatcgattaatttaacaggaaatgggatcacacccaatggtggcgatgataaggcgtttgctcaatttgttctaggaaaacactatctacaatttttacatagtcgatatacgggatggtcttctcgactagtaattgaatcggtattatcaacattaacgcacttaccaattctgtggcgattattaaacacattggcaatgtttactgttatctatatcccgtatctattgcttcttaaaggaactgatgatgatgagaatgctagtcgtctattgattagttttgggatgttcttcttattacctttcaatatgttctacgagacagggtggatggcaaccacaaccaattacctatgggttttagctgccggtttattagcgatgctaccttccttagctcaatatttaggaatagacattaaacataaaaaaataatttcagttgttgctttcttagccttaatctatgctgttaatcaagaacaaatggtaattatcctattattgggtaattcattgttattgtacgtaacaagaggaaataaaaaggcactggggagattggcatttcaattcgtagttactgtattgtctttgattatgattgttttagcaccaggaaatagcgttagaaaagtcaaagaaattcattggttaccattatttccaactttgtcaccctttaaaaaaattgagttaggtatttctagtacattaggtcacttctttttttcatttgatgtgcttgcgacaatacttgtgattttactttttgcgttttatataaatcagaaggggagatataaaataccgcgtacagttttctatattccggtactgttcagcgtgattttttggtttaaagatactttgattggaaaaatttatccaggattaaagaaaatggggggtgctgttactatttatgggacagatatctctttggccaatttacaatctatcttgccagatttacttctgattgtagtaagctgcattgttttattggggatattttcttcgggaaactctaaacgaatgtggttagttatggtagctatgttactcggacttatttcgagaatcatgatggggttttcaccaacaatttgggcatcaggagaacgaacattcctatttttatatgaggcacttatttttggttgcttctatttatatgatcaaattgagaaaaagaaagaatatcaaattttaacgcacattttaattggaattggtggcctagctttctgtgttattttatatacagtttaatgagtttgtagacaataacaggttatccgtgagaaactgaagttaaaattggatacagatatataataggcactttcgataaatataaaattaagattctatggagtatctatgtaaaagaaaacactgtaacagcagctcagcttgaaagcgggtatggtgaaactcgattcagatattataagaatcgggcatgcctgcaatttgcagatgcattcatgattgaagacttgcacgagttcaagaaataaaaagtgcggtttttgtgcggattgtctgtggttattagccggatttccgtgataaattagtattatggattattagtaaagcgcgcttaaactgtggccagtaatcaccggcggaaaacggtggtcgcgctgttgccaaaaatacgatctgttatacccggcaattagcgttaatcaaactttgttaggttaatcgacttcaattctaattgctggaagcgtggggttagcacgttgttgccgtggatgatcgcggacctaaccattcctagtagcttaaatagagcagcgcggaagtgcacctgcggtcacgattcgggttcgagtcccggctaggatattatcgcagtggcggaataggtaaagcgtctttacgccttaaaacggcaattgtgtggtgcaaatccacacctgcgatattgccagtaatggcacatacttcacctccaatagtcctagcctttatggctggggttttgtattatagatttattggagggtgaaaattatggatagagaaagtttgttagaaatgatcaataatccagaatcaattttaaaggctgataaaaaaacgcttaagcaaagaatagagcaacagaggttaacagctgatgagtatgcagaggctgcaatcgatacaggaaaatctaaaggtcgagaattggttgttgatatattaaatgggtctttagggagtcttatttttgatgtgattgaaactggcgatgaactaggccaaaacatatctgatatgaaaaaatctttggtcgttgcttcttatgtacaaaaatcagacgaccacgataaagcgttacaatgtattgttgacttaattacggatccctatggtctgacattgtattcaaaattaatagaaatacttaatgattcaccggcagatgatgataccttaaatgttttagccaacgttctaaggaatataagtaatgatagtgatttaaaagaacacttttcaaataagagagttgtgttgtctatgattgccaaactatcaccacaggcactcttagtattgcagaaagctaatagatggccgattatgaaagctcccaataaagcaagcatcactgttggaggaataatgaacggtgataacagtgagtatattgcacaaggattattaaaaactgaaatatttaatgacatttcaataacatcattaggactagcaatcaaggagttagaagtaaatggactatgtttcacggcgtctggcacgtttggcggtaaaaatgcagtacaagaaactttaacagattcgggcaaagaggtatataaattaatctattaatattatcaaggcagcctaggctgtcttttttaatcccgaatatttgtagtactgtaagattgagtctacaattaaagtaagaaagaagggatatcatggtagtttatgtatttgggcttcctagtcccaaagatgtttataagcgcgcaaaggataaaattcggaaacagaagaaagataaagagaagaaagcagaagaaggaccagttgcaacaactgcttaaggtaatgaaggatgtcaatacgacgtgtaattgatgtgatgatgcatcacgaaaatcaataaagagatatttgaaaacttttttaataaagtgaaatgcaattacaatcattagggaagtagcgacataaacatgaagttgtggtatattctggttaacggaaggtgatataatgtcaaagactattaatgagcaagttttcgaaataattgatgaaatgtataatgatttggcccacaaagaaattgatcagcatattaaggatattcttttaattgcagcaaaacatttatctacagaagatatgccagctcaagtggtagcagctaaaaccgtaaatggaattacaatttggaccatgaatggtaagaacttattgggtaatgaaaacgctgaacgaatccgaaaattgatgcggattgctcgctccgagggatacaaatggaatgcgactggcttaggttcattaggtgtacaattttaaaagagtttatcttgagacagcttaggctgtctttttttgtacataaaattaaaggagtgataggcattgtgaaactaatacattcaaagtacggctacgaaacacctgaatggacggcagcagatgcccgtttagagaagtggcttaaacagaagaagatagatgagaaacgtcgttcagataatgagcggcgtattttattggagaaaaacaattataagaaggagggcggtgctatgtaatgcatgatgaatcaagaaatgatgcaaaggaagactatttatctgggatgaagtacaaagacatcggagagtagacctctcaaaactaaacaaagtttcgacttcgcaaatgtacaaggttttccgtattattccttagaaaggaggtgatccagccgcaggttctcctacggctaccttgttacgacttcaccctaatcatctgtcccaccttagacggctggctcccgaaggttacctcaccggctttgggtgttacaaactctcatggtgtgacgggcggtgtgtacaaggcccgggaacgtattcaccgcggcatgctgatccgcgattactagcgattccggcttcatgtaggcgagttgcagcctacaatccgaactgagaatggttttaagagattagctaaacctcgcggtctcgcgactcgttgtaccatccattgtagcacgtgtgtagcccaggtcataaggggcatgatgatttgacgtcgtccccaccttcctccggtttgtcaccggcagtctcactagagtgcccaactaaatgctggcaactagtaataagggttgcgctcgttgcgggacttaacccaacatctcacgacacgagctgacgacaaccatgcaccacctgtcactttgtccccgaagggaaagctctatctctagagtggtcaaaggatgtcaagacctggtaaggttcttcgcgttgcttcgaattaaaccacatgctccaccgcttgtgcgggcccccgtcaattcctttgagtttcaaccttgcggtcgtactccccaggcggagtgcttaatgcgttagctgcggcactgaagggcggaaaccctccaacacctagcactcatcgtttacggcatggactaccagggtatctaatcctgtttgctacccatgctttcgagcctcagcgtcagttacagaccagacagccgccttcgccactggtgttcttccatatatctacgcatttcaccgctacacatggagttccactgtcctcttctgcactcaagtttcccagtttccgatgcacttcttcggttgagccgaaggctttcacatcagacttaagaaaccgcctgcgctcgctttacgcccaataaatccggacaacgcttgccacctacgtattaccgcggctgctggcacgtagttagccgtggctttctggttggataccgtcactacctgatcagttactatcaaatacgttcttctccaacaacagagttttacgatccgaaaaccttcttcactcacgcggcgttgctccatcagactttcgtccattgtggaagattccctactgctgcctcccgtaggagtctgggccgtgtctcagtcccagtgtggccgattaccctctcaggtcggctatgcatcacggtcttggtgagcctttacctcaccaactaactaatgcaccgcgggtccatcctaaagtgatagccgaaaccatctttcaaccttgcaccatgcggtgctaggttttatgcggtattagcatctgtttccaaatgttatcccccactttagggcaggttacccacgtgttactcacccgtccgccactcactcaaatgttatcaatcagaagcaagcttcttcaatctaacgagagtgcgttcgacttgcatgtattaggcacgccgccagcgttcgtcctgagccaggatcaaactctcgattaaaagtttgtagctcttgttttgttacttaatttatttgctagcgaaattgactttgcaaatatgttttgtgccccgaagggcgaccctacacatttggtttgtcgaaactttgttcagttttcaaagtgcgataatccctttatggttgtcagatgaaatacaataattcatctgacgactatggagggatttttgtatgcccagatctaaacatacggtactcgagaaattaacaatcttagatgaactgacccaatcaaaaattggactgggtccggtggccaatcgccatggcattaatcataagacgctagagcgttggcgagatcgatactcccgtgatggaattaatggtctaaaggaggctaagaaaaacaaacactattcgaagaaactcaagctcaaagtagtccacgcatatcttataggcgaaggcacctttgatgaacttgcaaataagtttggacttcgtggatcgcagcaagtcgtagactgggtaaacaagtataatgggaataaacctttgacggcgtcgccgtccagaaagcaggttcccactatgagccgtaaaacaaccttggaagaacgcattgaaattgtcgagtatgtcaccaagctgaatcattcatacacagaggccgctgaacgcttccaagtctcttatcaacaagcacgttcatgggtaatcaaggccaatcacggcggctatgaggcgctcgtggacaaccgtggccatcacaaagaacaagctgagctgactgaactcgataaagccaatcttgaaatcaggcagctcaaagcacagctcgcagacaaagagcttgtggaggcattcgcaaaaaaattgctggaaatccagcgcagggggtgagtaaacaacatcgactgtcttacttcgcaattaatgaggtcagtcaaggcaagcgtggtgcaatatctacgctgttggccgttgtcggtgtaagccggcaggcttactacaaagggttaaatcgagaagaaacagcttgggaagcccgtaatcgtcagctcaaggaacggacacaatactggtttgattttcatcatcaaggtatcggtgctgggaaccttttattgaatcttcaacatgatgacctaattgacttccccgttactttcaggatggtacgtcgtgtgatgcgggagctcagcttgacatgtcaaattcgggtcaagaagcacagtcgacataaggagaacgaacagcacattcaagacaatgtgctcaatcagaacttcgacgtcgacagtcctaatcaggtctggttgtccgattcaacggaactgacttacggcgtaaataataagtataaggtgcgcttgagtggcgtccttgatctctacggccgacgtttattgtcctacaatttgagcactactgaaacgtcagcagcagaaatcgaggttttccaacgagcctttgaggcttctggcgacgtccacccattggttcacactgatcgaggatcagcctacacctctggtgccttcaacaactttcttggtcgttacaacgtcacacgtagtatgtctcgaccaggaacaccatacgacaacgcaccgatggagcgctggtggaacgaattcaagttacggtggatggctcgccatccactagcaaagacttgcgaagagcttgtaagactggttgaggaaggaatcgaatatttcaatcaccacaaccgctcagcacaaagaaacggcctcaccccagatgaatactggagtgaagccgcatagagacagattcaactttatattatttcatttgtcaacttgacagggcctagtgcacctgaataattcatactttgttgcgtaaaggtaatttgccccttttaacgtttaatttagctcaaatttaatccgcaactatttttgagtgtatttgagctatttttaagacaattttatttttgattggtgtcaaaagagtaaactactcccttgatcgtacttaaattttttaaattgtcttttttaattactagtgagctgaaattcttgaatcctaaacaatgtttgccagtataaatcatcaaaaacattggtactagaaagatgcagccataatttacgtgcatgttgggtgactctgccggccaaatgaaagagcttgaaacgtaaagtggcgctcgttgcgttccctaattcagctgggaaaaccagttttttcatggcttgaactaagttataagccacaccggcgagtaacattctaaactggttagccgtaaaactggaactatccgttttatcaaaggcaaagccacttttaacttctttgatcagatcctccatggctccacgttggtgatagagttcaaagacgtcactggcaaaagccagctccaagttagtcacgataaattcgtgtttaaagagtagctcgccagcagggcgagttgatttaatgatcacggggtaagcgcgaccccaagtgtccggttggtaatctgtcaaacggtgccactggacatctttttcggcgaagtcttccccaggttgccccacatggatcaagtgctcggcgatccgttgtagttttggattagccttgagacggatcgtaaactttgccccagcttcttcacaggcggcataaatttctggcttggcaaaacccgagtcagcccggactagtacatctaaagcagcgtattgtttcagtagcggtttcaaaaaagcttccgcatttttggaagtgtattcgttacctggccgtaatttagctcctaagagacaacccgaaaaaccatcaaaagccaacaggggatgataaccgttcgtttgataatgggtgttaaaagcactgcctttctggtaaccaaatgtatcggaatgagtcgaatcaagatcaatgatcagttgacgttgcttcttttgtgtgatcactaactgcgctaacttggcgactaattttgtgatcccggccaagtcgtctgcggaaatttggttgatatagcgtgaaagagttggttgcgaagcaactaaattatctaaaacaagctcaaagctcatgtctgcggtcagtttattagcggcagtatcgtcgaaataacccgcaatcagctgaatcaacagttgtttaaacagctggttcttatggtacctatagaacttgcggttttccttaaaatggagagtttctttcaaaaggcgcttaaagtggatctgatgcataaattcagccactaaaattagacccgcatcgttagataaatgaccaccattattagaaagaaccagatttttgttgaagttaacggtttgttgttgtaaagtcgacatatggagcactcctgttctgtgttggttttggtcgacttaacaatagcacaggcttcacaaagaacaatttccaacggaagattcactggatcgcttcctggtttctcagtttaatgtttataacgagaagtctctgaagcggatccaacgagggttcaaaggactccaggacaccttggaagcatcatttatttaagttagatacatattatatgtacgaaggcatttcatttacacaagattcttgacgctaccctattttttttgttatagtcaaaataaagccagcgaaagcgaggaggacgtcatgaaacaatacacgaaatttttactgatgattcttgtctctacagttattatgtatgggttaatgtaccttaatgtgttccaattagatcatatttttctaagccaaacgcgactgtatatggcgctaattatgggcgccaccatggccattgtaatgctgttattcatgtggtcaatgtaccagaataaacgtttgaaccgcctgatcctacttggtagtgcggtgatatttgctggctcgctttatctagttcgtagccaagcgaccgtgcacgatgcagcttggatgcaagaaatgatcccccatcactcgaccgcgattctaaccagtgaacgcgcgcaactcagcgatccggaagtcaaagccctcgcacagaagatcgctaaaacgcaacgtgaagagatcacggagatgaaacgattattgaaaaaagttgccgatcaatagctgataaaaaataaggaagttgaccaatcgggccaacttccttattttttaggcttattaatcaaccgcaacgatctgaccagtcgcgatcggtaacgtaacgtgtgcatcatagtggccgaccattccggcaacactttctggcaagtgcacgttagcagtcacgccgtgaatatagatcacgcgtttttcaaggtgtaattccgactcaccaaatgcttttttaaagttagcttgtagctcacttaatgggactttcttctcataagtaaaatcaccgtgctcatccgcagttggatagcggtcatggggaatatccatatgttctggggcatcgtcaaaaggtaccatcgtcgtccccgaaacggcttcagtctccatgagatcaacaaaaccatctgcattcgcatcctgtgcagccgttgcgatcaacgcctgcttaccatccggaaagccatgaaaatgttcccaatgctgcatattggccggcgtgttgtgcattgtgatcttaatcgttaattcatcatctgcaattgcgaacgtcgcttcgccataagcagccgttccaatcttatccgcattcaatggtacaatttgtgctgcatagtgtgtggtcatcagcaaaacctccttgtattacctgaacaatgatcaatagctacgccgctagtataacacagttcagcgcttacaagtacctgattaggccaagcaagcagttatagcatattcttaattatgctatgatgaataaaatgcgtatattttaaatagtttaaaaatccggcgaaagataaattaaaaattttacccgtattgtcaatctaagtgcaacagtttctagtctaatcctataagtggtacacagcttagagttccggtatcagttccgccgcactccggtagcccaagatacgacgaggccggctgttgagtgcgtcctggaagctctgaatatcaatgatgtcgtaatggtggagtgagcgacctttcggaataaactctcgtagaaggccgttctggttctcatttgttccgcgctcccatggtgagtacggatgagcaaagtagacatcagttccttctactgaatctagttgtgcgaactcactgccgttatcaaaggtgatggtggtgaagtattccgcaccgtaatcatcaatgatggactgaagtcccaccttacaggtacttgctttgtagttagcgagcttgatgatgatttcgaagcgactcatccgctctgtcaaaaccagcaacgcaggttcgctatcaacgcgcttacctttcactaaatctccttcccaatggcccccttgccgacggtcttgaacttcaatgggtctttcatcaatcgaggtaccaagcttcgtcttattggtgcgggtatgggaatggcttcgtttaattcgcaagctgggtttgcgcggtaagtcgtgggtccgtagttcgaatctaccggcctcaatatcccggtaaaccgttggtgttgaaggaacaacctcgtctgcgtgttcccgtttgaaggtgtgcacgaagctgtccacactgtgtacgcgtggacgttgcttgatggcagcggcacaggcggcgtagaactcggggttcttctcaagcatcgtcttggggcgacaccactcccgccgctgagcgtgcagataagctgccgtatcagcaaagtaaatcaacgctaccttatgcccgggaattcgctgtagaacggagccacgagtgatctcacgcgaaatagtactacgagagcggttgagttcgcgggcaatccgtgcttgggagaatccctgattgagcagagtttcaatgcgaacgcgatcaaaatttgatagttgttggtaagccttagagatggtacgcttgatgttggtcatgatgtgcctttcttatgtgcttggttgcttataagaataggtcatcatggcctttttggtctatttaattatgtgttgcacttagattgtaaacgcgggtcttgaatataaacctcaattgtcaagttaagtgcaacactaatggcctattcttataattggtctagaaagttaaaccagttgtggcataacatccgctggacaactatagcttaaacagcggcggggacggtgattcagcgtgtcttgaaccaactgcagatccactaatgagaggtttttaaaggaatacccctttgggaagaactctcttaattgaccattcacattctcattagtgccccgttcccagggagaatatggatgggcaaagtagatttccgttccttgaacctgatttaaactagcgaattccgagccgttgtcaaacgtgatagtccgaaagttttctgcaccgtaatcatcaatcgtatcttggagggcttgccggcaagtctctgcccggtaatcaggcaatttaacgataatttccatccggctaactcgctcggttaacgtcattaaagctggttcggactcaacccgtttggctttcactaagtcgccttcccaatggcccaactcctgacgtttccgaaccactgcgggccggtcttcaatggactgtccaagccgttttttattcaggcgggcatgtcggtgattcgggcgtttaacgcggcgacgtagcttcatgggtaaatcatagttgtgaagctccgggagcttgccagcctcgatataccgatagaccgtagccgttgatgggcagggaaagcccgggtaatgagctttgaaatagtggacatacgtgtcgacactgaaaactcgtggcttagcttttaaagctttcggcagggacttgaagaacacggcagcccgctgcagtaaacctttggggtgacacttggcccgctgttctcgatagtaagccgccccgcgctcggcaaagtagccctgatatgaccgatgtttctgggaatcaatctgggtggttaacccgcgttttaattcgcgagaaatggtgctgggactccggtgaagccggctggcaatctgacgaacgccaaatcctaatcgagtcagggactcaatttgaccgcgttcaaaagattggagttgttggtaatgcttaggcatgatattcttagtttgggtcatgaagacacctatccttatctgttgattttgtcgttaataataagaataggccttcatggccttttaagctagtctaattggtctagttatcaagtgttgcacttcaattttaaatcggggtgctcctatgtcaataaatggcacatctttttctaaacactcgttctaattctgtcggaattaaaccaactgatgtaatttgaggttcggattaccaagtcctcaaaattggaaaaagttgtttgaaaggcaaactctctcttcaacaatgagtgaaaagcttcaattggcccattatcataaggataaccttgttttgagtatgagtggctaatctgatgccgttcaagtaaagtttcaacttcgttgctggtgtactgtgaacccatgtcagagtgaaaatattgtggcttttgatgatattcaagcgcctgattaatcgtttctacaactaacgttgcctccatctgacgaccaatcttgaaagcaagaacttgatgaacctttggttcgtaaatagaactgagataaacccaggttcctggacgtaattccaaataagtaatgtcagcacgccatatccttgcattgggctggtgcttgattaaattggggcgttgtgaatgatccacatgagtgccaggttttttaaatcgccgattcattaaagagtgaatctccatttccctcattaatcgtaaaattcgttttgacccaacacagatgcctgacttgcgaagcaccatcgttattcgtggataaccataggcacgataattattttcccaaatcaatttaattttttctttgagttgattatcaacacgttcgtgttgactaggttgatatcttttccaatggtaataggtgctgcgcggtaatttcagtgccgaaagaataattgataagcggtgtcgcaataactgatcttctatgaagacaaggcaattaattcgtcctaatgctttcccagtaacaccgctgcagcttttaaaatttcgagttcctcctttaatcgctgattttccttttgaagttgtttgaattctttggacgttacttcagtaccgtcttctagctcaactgatttagcgcctttaacccagttatgaattgcggctggagaaacaccgtattcctcggaaagcgagcgaatagatcttttctctttacgatgcatcttcacaatgctggctttaaaatcatcttgatatcgtttcattggaatgctcctatcttgttttattaattatggcacaactgttcagaaatttatgtaccaaatactaggataggagcaaagcccggaatctttcaatggcagtctgttgatgatgtatttttaatggtcgttgattaattagttcaagtgctgctaggatctcatcagtcgttacttggctaaaattggtctttttcgggaagaaccagcgtaaccgtctattaaaatattcattggaacctcgctcccatggtgaatatggatggcaaaaataaactttgatctgataatcctgttctaaggcctgataattggcaaactctttaccatgatcaacagtaatggattttacttggggaccgaaggcccccataaacttgccaaaggcggtgtttagagccttagccgttctattaggggctttgatggcccatagaagtcgggtcttacgttctacgaatgtaaccagacatgatcgtgactcacttcgactagaaagcaccgtatctacttcccaatgaccaaaagctaaccgttgattaacagttgttggccgttgttcgatggaagtcccacttgtaaatttcccacgattttcgctcactcggtgctggcggacattccgattgggtagatcagtcaatttgaaggggagccagccacgattaagccaattataaattgacgcagtgctcaagttataagcggccgcaatggtttctggtgaccaggttaatcgtaagtgattggtaattaaagtcgctaatgctgccgtcagcatcgaacgacgaccgcaattccgccttttgcgatctgcatcttgctgagctaattctggatcataaggtttaactcggtccaactcatagctaatcgtagctttggcgacgcctaaggcgtcagccattacttggtaagatttattcccctcattgaccagttgtgctagtgcgccacgttgaaaacgtgataaagtagatgtacccaaagtaatcactccctatattggttggaattagctactaccattgtaagtgattgctttgggctttttaatttctgttcggattaattatagaatttgccactacaaatcgagaatgaatacctaaaaaaattaagagccttagtccaggaagaagaaaacaacaagcgcaagtcatccaagagctaaggcttaaacacaaactagtaaaaattctaaaaatagttggtatggccaaaagtacgtatgaatacattattagtcatgaaccgaacggttcatctgaccaatctgttaaacaaaccatccaaataatcaagaagaatcatccagcgtacggttatcgtcgtgtaactggtgaattacatcgtatgaatatcttagtaaatcataaaaaagtacttgtcttaatgcgagaactgcaattactatcaactgcgtttaacaaacgtactcgtaaatataattcatatagaggcaatgttggtaccgttgctaagaacttaatcaaccgtcgtttcttcactgatcgtccttatcaaaaactagtaacagacgttactgaagttcgctggggaaccaagacaattgatgaacgcgcctatttcacatgtatttatgatttattctcaggtgaaattctcagccatcaagttagtaaacaccctactgttgaatttactacaactgttttgaattgagcagttaagaaaatccctaagaatttaaaataccggacaacagtccactcagatcaaggatttcaataccagcatcaagattggactcatatcttgaaagaacatcgcatttttcaaagtatgtctcgcaaagcaacatgtttagataatgcagcaatggagagctttttccatattatgaaagccgaagctttctaccaaaaagaaaccgatacttatgaaacgctagtttcacaaatatcggtttggattgatgaacttgctgggcaccgcattacgcgtatcttatcagtactcaaaattccgcgctcaacctactatgattatctacattggcagccaagtagaactgaacgccgccggcatttaattaaacaagaagtgttaacggcttggttaagatatccaatgtatggctacccacgattaacgatcttactaaatcaacagtctgatattcacgttagtcagcgtctggtctatcaacaaatgtgtgaattagggattagatctagaatggttaaacgaatcaataagccaaccactcagactgattatgatcagcgaccaaacttgattaagcagttaactgatcaatctggtattttattgactgatattacgtacattccccttaaccatacttggtgttacctagctagtgtctataatccagtaacccgacgggttattgcttaccaacttaatacgcagatgactaaagaactagcgactaacgttattacccaagtcatggcgcaagcagttaaaccacaaattattcatagtgatatgggaagccaatacacaagtgacttatttgaaaacactttatcgaagtatggtatcaagcattcttactcccgaaagggtcagcccggcgataacgcgcgaattgaaagttttcattcaattttgaaacgtgaatacgttaatttccaagattttaagacaattcatgaagcaatcgccggaattgataactatattcgttggtataacagtgatcgtatttcacttgtagcgtagctacaggctattaaattcaataatgttggggcttatttaatatactctaaagcgtttttaaaatctgaacgggactaaaacttcggatgatttaaatgccaattccaggcagtttcaataattgcttccatattgtcatactgtggcgtccaacctaagacttcgcgtgctttgtcacttgcggcaatcaaagtacttggatcaccagcacgacgcggtgccattgtcacaggaattgccttgccagtcactttgcgagcggcttcgacaatttccatatttgaaaaaccagttgatgagcctaagttaaaggcgttactatcatggccttcttcgaggtaaccgagggccaaaatatgggcgtcggctaagtcgaacacgtggacatagtcgcggacgttagtgccatctggtgtatcataatcatcaccaaagatggagagttgttcacgtttgccagcagccacttgtaacacgattggtaacaagtgggtttctgggtgatgatcttcaccgattgaaccatctggtttggcaccagcgacattgaagtaccgtaatgcaacgaatttaataccgtaagctctgtcagcccatttcatcatcgtttccatcattaatttactttcaccatacgggttagttgggacttgtgggtcggattccttaattggaattgatttcggttccccataagtggccgctgttgatgagaagacgatgtgtttgacgtcgaattcattcatcacttcgagtaaggcagtcatgccgtatgtgttattgtcgaaatatttaagtggtgcttgcatcgattcgggcacgattgagaaagcggcgaaatgaatcacaccgctgactttttcttgttggaagacgctgcgcatgaaatctttgtcgcgaatatcgccttggggttctggtgcaaattttcctcgctgacttgattttagtatactgggtgccaagaaacgagggattgcgcgcatgaatcactttaagggacgccactttcaaaaggacatcatcttagtagccgttggctactatttcagattcagtctcagctatcgtgacatcgttgaattgcttcgggatcggggtatcactgttcatcacaccacggtcatgcgttgggttcatcactatggccccatctttaaggctctatggcgtcggcatcaaacagctcacgctaaaagttggcgaatcgatgagacctatattcgagttaaaggccgttgggcctatttgtatcgcgctattgacagtaacggtttgaccatggattttgagctacgaaaacaccgcgattataccgcatcctatcactttttgaagcgtctcttgacgaccaatggtcggcctgatcgattagtcactgatcaatatcgggcaacactgaaagcagtgaagcacctgataaagcaagactatttgagcaaatcagcccaccaatgttccaaatatcgaaataatttgattgaacaggaccaccgattcattaaacgtcatcgtgtccgctcagcaagctttcaaagcattcgaaccgctagtgcaacgttgagcggtgtggaaattgttcacgcaatacgcaaaagaacccgacgagagttaagtctcatcgggttctcagtcgtggacgaattagaagcattgttagctgcataaccttcaacataggatcaatagctggttagatggtcatctctcacactgtttgcaccagatcctcgggaaaacaggattcgaacctgcgaccccctggtcccaaaccaggtgctctaccaagctgagctatttcccgttatatgcacccagtaggagtcgaacctacaaccttctgattcgtagtcagacactctatccagttgcgctatgggtgcatttttcattatgatgccgaggaccggaatcgaaccggtacggtagtcacctaccgcgggattttaagtcccgtgcgtctgccagttccgccaccccggcttaatcataatgaaagcggaagacgggattcgaacccgcgacccccaccatggcaaggtgatgttctaccactgaactacttccgcatcttaatgccgactagacgattcgaacgcccgaccctctgattacaaatcagatgctctaccaactgagctaagtcggcataataagataactttcattgaatattcaattgaatgcgggtgaagggacttgaacccccacgtctatatagacactagaacctaaatctagcgcgtctgccaattccgccacacccgcattttggcgtgtaacttggccgatgagtcgtgacaggctcgaactgtcgaccctctgattaaaagtcagatgctctaccaactgagctaacgactcaatggaggttacagggctcgaacctgtgaccctctgcttgtaaggcagacgctctcccaactgagctaaacctccatcaataaaatggattgaagtcaatatttgagacagattttaagagacattcagaaccgcgtttaccttccacagctcaaataaatcattaatcgcgattaataacttatttgaaccctggaaagcattaaatcaggcggccatttggctcgtaagtgttgcaatttcaacttgtaagggggtctggtagcccagtgaactatgaattctcttcctattgtagaaagcatgcacatattcaaaaaggacggcagcggcagtttcataatcttcaaagaccggcactggataaacacattcctttttgagggaagcgtgaaaggattccattggcgcattatcatacggataacccttacggctgtatgagtggcggatatgtagctcagttaaacgttgattgtaatcatcgctggtatactgtgatcctaaatccgtatggataatcaggtccccagtaatggttcgatttttaaccgcgctttcaagggtctttaagactaaatcagtagccatcttttttgagaacgaatagccgataatccgtcgtgagtgcaggtccatgatggttgataagtaacaccagccattacgcttcgtttgaatataggtcatatcagcggtccatttttgatttaaaccagtggtcgagaaatcctgcttaagcaagttgggacgctgttcaaccttggttttggaagccgaagcttttggaggagtagcgaagtggctaaacgcggcggactgtaaatccgctccttcgggttcggtggttcgaatccactctcctccatattttttagggatatagtttaaaggtagaactacggtctccaaaaccgtcagtgtgggttcaattcctactatccctgtttatattatagcttgcatattatgtgtgaatgtagtataattattcatgttaatgatggcggtattggtgaagtggttaacacatcggtttgtggatccgacatacgtgggttcgattcccacataccgcctttattcttgggctatggccaagcggtaaggcaacaggttttgatcctgtcatgcgctggttcgaatccagctagcccaatttactttttaagggacaggatttgttcttttatggcggtatagccaagtggtaaggcagaggtctgcaaaacctttatcaccggttcaaatccggttaccgcctttgcgtttaggcgctaaccttaattggtcaaaatgccggtgtggcggaattggcagacgcgcgggattcaaaatcccgtttcctcacggaagtatcggttcgaccccgatcaccggtataattgaacattatacagttttaaaaagccttagagatagggctttttttgttgcgttaataccatggttcttttgaatactaatagttaattgggtggtgcgcttgagatgcttattaaagttctcaatcaggttagtggagtatagtgattgccggatagctggtggaaagtccatgaaagtgagtaaattcggcattttaagcagatctttgattaatttgggataggtctgatgccagttgttggcgaactcattcagtttcagttcggctgcttcacggttggcggcccgatgaacttgtttaaagtcactgatcacggccttgcggtcttttacgcgaactttgttcatcagattccgcccaacatgaaccaggcaacgttgtcgtttggctttagggaaatgccgattcaagccttcatccaaaccaactaacccatcggccacaaacaacagcacatctttaacgccttgcttgataaaggttcccagcagttcagtccagattccagtcgattccgctggcgccacttggtagttcagcacttctttcgtaccatctggacgaatgccaatcgcaatatgaacggcttctttttgaacggtatcccgccttaacggcaagtaagtggcatctaagaagatggccgcatattgtgaagccagtcgacgttgctggaaagcttgaacctgttcattgacggctttagtcatgttggaaaccgtggctttggagtagtgagcaccgtacatttatcatgaatatgcgggtgtagtttagtggtaaaaccacagccttccaagctgttgtcgcgagtccgattctcgtcacccgcttttcatgggcctatagctcagctggttagagcgcacgcctgataagcgtgaggtcgatggttcgagtccatttaggcccattatctaaataatatggagaagtactcaagtggctgaagaggcgcccctgctaagggtgtaggtcgggaaactggcgcgagggttcaaatccctccttctccgttttgtatggcccgttggtcaagtggttaagacaccgccctttcacggcggtatcatgggttcaaatcccgtacgggtcattgtcacaatgttacattttatatgttttatggagaattacccaagtctggctgaagggaacggtcttgaaaaccgtcaggtgggttctgcccacgcgagagttcgaatctctcattctcctttatattatcgcgggatggagcagtctggtagctcgtcgggctcataacccgaaggtcgtaggttcaaaccctactcccgcaatgacaacttttaagagagggtataatgaataaatcatctctcaaaaggaaggaatttttacatgccaactcgttacgacaaagaattcaaacaaaacattatcaacctatataagcaaggcgaatcagctgcccaactggccagagaatatggcattggctattcaacagttcataagtggatccagggccaggccaaaactcaatccggtaaatcgccagacgaaatcaaagcgatggaaaagcgactggcttcgctgtctgaggagaacgaaatcctaaaaaaagccctgggcttccttgcgcagaagtaaccaatatctttgattacattcaccaagaaagccatcaccaccaggtaaccaagatgtgccgaatcctcggtgtttccagagctcagtattatcgttatcgatcccccaaaccttcaaaacgccgggccgaagatgcgggcttgaaacaacggattctgcggatctttgcggaatttaagcagcgatacggtgttatgaagatccaccatgaattgaatctggaacttcaaccactgcaagcctccgaaaattaaattaagtaatttaaattgaaagtcaaatttgttcgtacttttatgtccggattcttgacataggagcctcgctgataaatatgatgtgtcgattaataccgtgaaatcatggaaacagcgtaatggatgggaacgtgggccaaataaaaaagcggtgcaccccaaaagcaaaaagggtgcacacaaagttgaaaaggttgcacccaaaatagtgaaggaattatctgctaatgatgggttaaacgatcaacagaaaatgttctgcttgtactatctgcaacgattcaatgccacatgggcttatatgcaagcttatgacgttgattacaagaccgctaatgtaaatggcccaaggttgctagtaaatgctagtgtgcgtgagcaaattgataagctgcgtaacgagattgctaacgacctattcgttacagctgatgatatcgctaaagagtacgctaaacaagcattcgctgatattggcgattacgtagggctctagtgcaggtcagactgctgagatcactattggcaagatggattctgaaactttattagttgatgcagccaacgttaaattgggaactgcagttgatgcatctgcttctatcaagaaaataactgatgcgatcaatacagtttctgatcaacgtgctgatcttggcgccgcacaaaatggtttgaaccatactatcaacaacctaggtacaactacagaaaacctttctgaagctaactcacggatcgaagacgttgatatggcagaagaaatgatgaactttacgaagtcaaacattctttcacaagccgcaacatcaatgttggcacaggctaacgcaatgccaaacagtgtcttgacattacttcaaggctaataattgctgaatgaatctaattgctcatacaaaatgattatgttgaaacatataactggtataaggatcattatcactgtaccggttttttgattaaaaagaaaaatatttttcactttagcact
